(19) United States
(12) Patent Application Publication
(10) Pub. No.: US 2006/0246470 A1
(43) Pub. Date: Nov. 2, 2006

(54) RNA expression profile predicting response to tamoxifen in breast cancer patients

(76) Inventors: Suzanne Fuqua, Sugar Land, TX (US); Yukun Cui, Sugar Land, TX (US); C. K. Osborne, Houston, TX (US)

Correspondence Address: Fulbright & Jaworski L.L.P., Fulbright Tower, 1301 McKinney, Suite 5100, Houston, TX, 77010-3095, US

(21) Appl. No.: 11/295,188

(22) Filed: Jun. 15, 2006

Related U.S. Application Data
(60) Provisional application No. 60/633,632, filed on Dec. 6, 2004.

(51) Int. Cl. C12Q 1/68

(52) U.S. Cl. 435/6

(57) ABSTRACT

The present invention regards predicting a response to a therapy using RNA expression profiling. In particular, a resistance to a chemotherapy, such as tamoxifen, is predicted by comparing expressed genes in a patient on the therapy to a patient sensitive to the chemotherapy. In further embodiments, there is an RNA expression profile indicative of tamoxifen resistance in an individual. In additional embodiments, the RNA expression profile comprises DUSP6 EBP50, and/or RhoGDIa.

[0001] The present invention claims priority to U.S. Provisional Patent Application Ser. No. 60/633,632, filed Dec. 6, 2004, which is incorporated by reference herein in its entirety.

### STATEMENT REGARDING FEDERALLY SPONSORED RESEARCH OR DEVELOPMENT

[0002] The present invention utilized funds from the Department of Defense Grant DAMD 17-99-1-9399; Department of Defense Breast Cancer Concept Award, Contract W81XWH0410640; and the National Institutes of Health Grant R01-CA72038. The United States Government may have certain rights in the invention.

### FIELD OF THE INVENTION

[0003] The present invention concerns the fields of molecular biology, cell biology, cancer therapy, and medicine.

### BACKGROUND OF THE INVENTION

[0004] Breast cancer remains a significant health problem in the United States, affecting the lives of over 140,000 additional women each year. Breast cancer treatment involves surgical removal of the tumor, followed by adjuvant therapy to eradicate malignant cells that may have escaped from the site of the primary tumor. Since the steroid hormone estrogen can stimulate breast tumor growth, agents that either inhibit estrogen synthesis, or antiestrogens like tamoxifen (Tam) which block its receptor, are the standard therapies offered to women with estrogen receptor (ER)α-positive cancer (Baum et al., 2002). In many cases, however, these therapies eventually fail and metastases appear as endocrine-resistant disease. It is hoped that a thorough understanding of the factors that stimulate breast tumor growth during the transition to resistance will afford new strategies for inhibiting metastatic spread of this disease.

Prediction of Clinical Course

[0005] The standard prognostic factors currently used for primary breast cancer decision making in the United States (reviewed in (Clark, 2000)) are: involved axillary node status (Fisher et al., 1978), histologic subtype, tumor size (Carter et al., 1989), nuclear grade (Scarff and Torioni, 1968; Fisher et al., 1980), estrogen and progesterone receptor (ER and PR) status (McGuire et al., 1992), and measures of cellular proliferation (Clark, 2000). A number of factors useful for prediction of treatment outcomes have also been put into routine clinical practice. These include: ER, PR (McGuire, 1978), and HER-2/c-ErbB-2. Although many genes were originally attractive biomarkers with appropriate biologic rationale, they have failed to independently improve the prediction of outcome when compared to these standard factors. In addition, while combinations of standard prognostic factors can identify subsets of patients with highly significantly different disease survival curves, they still predict individual outcomes poorly. Thus, few molecular markers discovered during the current revolution in breast cancer molecular biological studies have come into clinical use as standard prognostic or predictive factors. In addition, the role of prognostic factors in the management of breast cancer has clearly changed, with the majority of node-negative patients now undergoing systemic adjuvant therapy because one cannot precisely determine an individual's risk of recurrence. Undoubtedly, since only a minority of node-negative patients will ever develop a recurrence, there is a critical need to identify those patients with extremely low risks of breast cancer recurrence to spare these patients unnecessary over-treatment of their disease.

The Application of Microarray Technologies to Breast Cancer

[0006] RNA expression of individual genes can be detected and quantified by a variety of techniques, such as Northern blot analysis, S1 nuclease protection, differential display, and serial analysis of gene expression or SAGE (Alwine et al., 1977; Berk and Sharp, 1977; Liang et al., 1992; Velculescu et al., 1995). Recently two array-based technologies, cDNA and oligonucleotide arrays, have been applied to gene expression quantification (reviewed in Cooper et al (Cooper, 2001)). Simply defined, a microarray is an orderly arrangement of known and est (expressed sequence tag) DNA sequences attached to a solid support that can be interrogated with cDNA or genomic DNA. The advantage of the newer microarray technologies is the ability to measure the RNA expression of thousands of genes at one time, and to relate how the gene expression pattern of one gene correlates to the expression of other genes in or between different tumor samples, or to measure DNA amplification or loss of DNA. The simplicity of experimental design for microarray analysis provides a vehicle to tackle the complex nature of the breast cancer genome with exquisite detail. However, emerging from early experience with this technology, there is a growing appreciation that “more data” is not necessarily better. Experimental design issues will be the subject of a later section.

[0007] Since the RNA expression microarray technology provides a method for monitoring the RNA expression of many thousands of human genes at one time, there was considerable anticipation that it would quickly and easily revolutionize approaches to cancer diagnosis, prognosis, and treatment. The reality remains extremely promising but is also complex. A potential complication in the application of microarray technology to primary human breast tumor samples is the presence of variable numbers of normal cells, such as stroma, blood vessels, and lymphocytes, in the tumor. Indeed, it has been demonstrated using gross analysis of human breast cancer specimens compared with breast cancer cell lines, that the tumors expressed sets of genes in common not only with these cell lines, but also with cells of hematopoietic lineage and stromal origin (Perou, 2000). Laser capture microdissection has also been successfully used to isolate pure cell populations from primary breast cancers for array profiling (Sgroi et al., 1999). In this seminal paper, Sgroi et al. (1999) utilized laser capture microdissection to isolate morphologically “normal” breast epithelial cells, invasive breast cancer cells, and metastatic lymph node cancer cells from one patient, and was able to demonstrate the feasibility of using microdissected samples for array profiling, as well as following potential progression of cancer in this patient. However, with the emerging data supporting important roles for the surrounding stroma in breast cancer progression (reviewed in (Chrenek et al., 2001; Haslam and Woodward, 2001), and the labor-intensive and technically challenging nature of laser capture technology with subsequent amplification of RNA for quantitation, most published investigations to date have evaluated total gene expression to identify prognostic profiles, as will be described below.

Expression Microarray Analyses for the Identification of Prognostic Factors

[0008] Many of the first explorations into the use of expression microarrays were designed to evaluate the technology for molecular and/or morphologic phenotyping of breast tumors. One of the first comprehensive attempts to characterize the variation in gene expression between sporadic breast tumor samples was published by Perou et al. (2000). This groundbreaking study was the first to establish that tumors could be phenotypically classified into subtypes distinguished by differences in their expression profiles. Perou et al. examined 40 breast tumors, and 20 matched pairs of samples before and after doxorubicin treatment in their study; tumor samples were grossly dissected. An “intrinsic gene set” of 476 cDNAs were selected that were more variably expressed between the 40 sporadic tumors, than between the paired samples. This intrinsic gene set was then used to cluster and segregate the tumors into four major subgroups: 1) a “luminal cell-like” group expressing the estrogen receptor (ER), 2) a “basal cell-like” group expressing keratins 5 and 17, integrinβ4, and laminin, but lacking ER expression, 3) an Erb-B2-positive subset, and 4) a “normal” epithelial group.

[0009] A subsequent study by this group has extended the molecular profiling of breast cancer by applying their intrinsic gene set to cluster 78 cancers (the tumors from their previous study were included in these), 3 fibroadenomas, and 4 normal breast tissue samples (Sorlie et al., 2001). The same subgroups were found as before (Perou et al., 2000), except the luminal, ER-positive group was subdivided into further subsets with distinctive gene expression profiles. Since clinical outcomes were available on some of the patients, the authors also examined whether their phenotypic profiles could function as prognostic factors. Univariate survival analysis was performed on 49 patients from the study with locally, advanced disease, but without evidence of distant metastasis. Although ER-positivity was not a significant prognostic factor on its own in this analysis, the luminal-type group enjoyed a more favorable survival (Sorlie et al., 2001) compared to the other groups. Conversely, the basal-like group had a significantly poorer prognosis. This study is clearly encouraging that significant differences in outcome can be ascertained from microarray expression profiling.

[0010] More recently, van't Veer et al. (van't Veer) have used RNA expression microarray analyses to identify a 70 gene prognostic signature (“classifier”) in young, axillary lymph node-negative patients using a training set of 78 tumors, and then tested the classifier in a validation set of 19 tumors. The study used a case/control design and employed 5 years of clinical follow-up to define their “good” (controls) versus “poor” (cases) prognosis patients. The optimally accurate prognostic classifier correctly predicted disease outcome for 65 out of the 78 (83%) patients, identify poor prognosis outcomes with a sensitivity of 85% and good outcomes with a specificity of 81%. Thus, the study demonstrates the feasibility of molecular profiling for sub-classification of patient outcomes using undissected clinical material. However, it is known that more than 40% of recurrences in node-negative women will occur after 5 years, thus bringing into question whether this study is representative of all recurrences.

[0011] Van de Vijver et al. (2002) have now extended this study with 234 additional young (<53 years), stage I-II breast cancer patients with both node-negative and node-positive disease using the 70 classifier genes from the earlier study (van't Veer et al., 2002) to classify the patients. The authors were able to classify patient outcomes (sensitivity=93%, specificity=53%) that are consistent, or perhaps better than estimates which can be obtained with current prognostic indices. There are several clinical notes about this study, in addition to the short follow-up of these patients. First, is the young age of the patients. Based on the age structure of the US population in 2000 and the most recent, publicly available age-specific incidence rates from SEER (available on the World Wide Web), at least 79% of women with breast cancer in the US will be 50 years old or older. We also know that there are great differences in biological markers, such as ER status and proliferation rates, between younger and older patients, which may complicate the marker profiles identified in this study. Finally, the confounding effects of treatment need to be considered (Borg et al., 2003). In the good prognosis group, it is impossible to dissociate a less aggressive gene profile from responsiveness to the adjuvant treatment. Thus, these data are problematic in that one cannot tell whether the markers reflect those important for the natural history of the disease without treatment, or are solely related to the treatment received.

[0012] Several groups have identified specific gene expression profiles associated with ER-positivity using expression microarray analysis of human breast tumors (Perou et al., 2000; van't Veer et al., 2002) (West et al., 2001; Dressman et al., 2001) or SAGE analyses (Porter et al., 2001). The ER itself, along with other estrogen-induced genes, has been shown to be characteristically expressed in “good” prognosis patient subsets using microarray analysis. This is perhaps not surprising given the important position of the ER signaling pathway in breast cancer progression (Fuqua, 2002), and that ER is expressed in about 75% of women with invasive breast cancer (Harvey, 1999). ER expression is an important prognostic factor predicting the natural history of breast cancer after surgery; ER-positive patients have a longer interval to recurrence, and many studies have shown an improved overall survival as well. ER positivity is also a good predictor of response to hormone therapy in women with invasive breast cancer (reviewed in (Elledge et al., 2000); tamoxifen adjuvant therapy halves the 10-year recurrence risk of patients with ER-positive tumors, and reduces the risk of death from metastatic disease by 26% (Early Breast Cancer Trialists' Collaborative Group, 1998).

[0013] An interesting study was reported by Gruvberger et al. (2001) who profiled 58 grossly dissected primary invasive breast tumors, and used artificial neural network analysis to predict the ER status of the tumors based on their gene expression patterns. They then determined which specific genes were the most important for ER classification. By comparing to SAGE data from estradiol-stimulated breast cancer cells, they determined that only a few genes of the many genes that were associated with ER expression in tumors were indeed estrogen-responsive in cell culture. This observation lends further support to the hypothesis developed by Perou et al. (Perou et al., 2000) that basic cell lineages, such as the luminal ER-positive cell type, can be partly explained by observed genomic gene expression patterns, rather than downstream effectors of only one pathway, such as the ER.

[0014] A few investigators have begun to study putative precursor lesions of invasive disease, such as ductal carcinoma in situ (DCIS), using genomic approaches. Porter et al. (2001) have exploited SAGE analysis to compare 2 SAGE libraries prepared from DCIS, to 2 libraries each of normal, invasive, and metastatic cancer. Of note is that the authors used either manual macrodissection, or magnetic bead separation specific for epithelial cell content to prepare these libraries. They found that tumors of different histology had very distinct gene expression patterns. However, no genes seemed to be specific only for the DCIS or metastatic lesions. Interestingly, the most profound expression pattern changes were found to occur during the early normal to DCIS transition, suggesting that this type of study might identify future targets for chemoprevention.

[0015] Recently, Adeyinka et al. (2002) have performed a systematic study comparing 6 cases of DCIS with necrosis, to 4 cases without necrosis utilizing manual microdissection or laser capture microdissestion to prepare the samples for microarray analysis. These authors report that only 69 genes were consistently and differentially expressed between the two histological types of DCIS lesions. Genes important for angiogenesis were notably increased in the DCIS with necrosis group of tumors, as well as other genes involved in migration and hypoxia. Thus this study demonstrates that although gene expression is mostly similar between morphologically distinct types of neoplasia, differences in expression can be identified using expression array profiling, providing hope that this technology will provide profiles predicting cell behavior in early breast disease. Since it has been demonstrated that very early precursor lesions, such as atypical ductal hyperplasia, are genetically related to invasive cancer, and are indeed precursor lesions (O'Connell et al., 1994; O'Connell et al., 1998), there is much anticipation that these lesions will provide valuable information about the origin and etiology of early disease. However, systematic microarray analyses with ductal hyperplasias have yet to be reported, probably due to their rare inclusion in established frozen tumor banks, and their small size.

[0016] A few studies have utilized new genomic approaches for the study of inherited breast cancer (reviewed in (Hedenfalk et al., 2002)). There is accumulating evidence, both epidemiological and histological, that tumors arising as a result of mutations in the two breast cancer susceptibility gene families (BRCA1 and BRCA2) are biologically distinct. For instance, BRCA1 breast cancers are most often ER and PR-negative, but BRCA2 cancers more often tend to be positive for these receptors (Verhoog et al., 1998; Osin et al., 1998). In a seminal paper published by Hedenfalk et al. (2002), 7 tumors each from BRCA1 and BRCA2 gene mutation carriers, or sporadic breast cancers were compared by expression microarray analysis. They found that the gene expression profiles of the three tumor groups differed significantly from each other, underscoring the fundamental differences between BRCA1 and BRCA2 mutation-associated tumors. Of course a potential confounding issue was the differential distribution of ER between the BRCA1 and BRCA2 tumors. However, even after removal of ER/PR-associated genes from the analysis, the two inherited tumor groups were still discernable. Thus, ER status alone does not fully explain the observed differences in gene expression profiles. Although this study is obviously very small, and other confounding issues such as tumor stage, grade, and treatment were not able to be considered, it does set a foundation for larger validation studies to confirm differential genes which could then provide important clues to the etiology of inheritable breast cancer.

Expression Microarray Analysis of Metastatic Breast Cancer Behavior

[0017] There is a growing understanding of the basic biology of the metastatic process (reviewed in (Welch et al., 2000)), and cancer metastasis is known to be an inherently inefficient process with only a subset of micrometastases persisting to form clinically evident metastases. Thus, the detection of breast cancer cells in the blood stream, or in secondary organs such as lymph nodes or bone marrow, does not always predict the ability of the primary tumor to form viable distant metastases. In order to increase the survival of breast cancer patients, an increased understanding of the key genes and mechanisms supporting metastatic behavior of human breast cells needs to be elucidated. Although it can be argued that treatment with metastasis-targeting agents may be of limited value, metastasis prevention in the advanced disease setting may have a clinical role by preventing secondary metastases as tumors progress.

[0018] Using 9 paired primary and axillary lymph node tumor samples, it has been determined that the gene expression patterns within each pair were more similar than between pairs (Parra et al., 2002), suggesting that gene expression patterns necessary for metastasis are probably already present in the primary lesion. It can be interpreted that these data further validate the use of primary tumors for studying recurrence and metastatic behavior. This result is also consistent with the original “soil and seed” hypothesis of Paget (1989) which suggests that tumor sub-populations with metastatic potential preexist in the primary tumor. These are disseminated, and then encouraged to colonize at other sites depending on the microenvironment in the distant organ.

[0019] Unfortunately, distant metastatic tumor samples from breast cancer patients are rarely biopsied or stored in tissue banks, thus these tumors are a very rare resource that have infrequently been examined by microarray analyses. However, the vast majority of human breast cancer cell lines were originally derived from metastatic breast lesions, and thus are a surrogate, albeit incomplete since the stromal tumor component is lacking, of the metastatic phenotype. A number of investigators have used human breast cancer cell lines for microarray analysis. Nacht et al. (1999) were among the first to describe expression differences between primary and metastatic paired cell lines (termed 21PT and 21MT, respectively). Furthermore, they validated this differential gene expression in 7 primary breast tumors, and 10 metastatic tumors using a custom array of genes differentially expressed in the paired cell lines. The expression of several genes that have been profiled in human tumors (Perou et al., 2000) was found to be associated with the metastatic phenotype, including mucin 1, c-Erb-B2, and thrombospondin (Nacht et al., 1999). Schwirzke et al. (2001) have used two sublines of MDA-MB-435 cells, one metastatic and one nonmetastatic, to profile metastasis-related gene expression. They report that the metastatic phenotype, as expected, was associated with deregulation of genes involved in motility, transmemebrane signaling, and extracellular matrix function. Unexpectedly, they also identified genes involved in the immune response to be lower in the metastatic subline, suggesting a mechanism for tumor metastasis “escape” from immune surveillance. A number of other groups have also profiled human breast tumor cell lines with different invasive and metastatic properties (Zajchowski et al., 2001; Ross et al., 2000), and have attempted to correlate these phenotypes with gene expression patterns, but definitive conclusions are incomplete due to the heterogeneity of the cell lines examined. Thus, the approach of using paired sublines with differential metastatic phenotypes appears to be a more optimum approach to identify genes specifically associated with metastatic behavior.

The Use of Tissue Microarrays (TMAs) for Confirming Protein Expression and Gene Alterations in Clinical Samples

[0020] New genome-wide techniques, such as expression and CGH arrays, which evaluate thousands of genes in a single experiment, can comprehensively profile RNA and DNA from tumors. A companion array-based, high-throughput technique called TMA (Kononen et al., 1998), and reviewed in (Kallioniemi et al., 2001) has been applied to the problem of confirming expression changes predicted by microarray experiments. TMAs have many advantages when evaluating large numbers of clinical samples. A simple high density TMA may contain up to 1000 cells (0.6 mm core) from donor paraffin blocks representing 200 to 500 cases, depending on how many replicate cells are used. This technology subsequently reduces the number of slides to cut and stain, preserving samples, and increasing efficiency in evaluation. Good agreement between traditional methods and TMA analysis of markers has yielded significant associations with survival, similar to that found by traditional analysis on large tissue sections (Torhorst et al., 2001; Zhang et al., 2003). Thus, it does not appear that tissue heterogeneity severely hinders the use of TMAs for these types of protein-based studies.

[0021] In the previously described study by Sorlie et al. (2001), an association between the expression of cytokeratins 17 and/or 5 RNA, and poor clinical outcome was observed. In a follow-up validation study, van de Rijn et al. (2002) used TMAs of over 600 breast tumors to confirm predicted clinical associations, and to demonstrate that protein expression of these cytokeratins was a prognostic factor in node-negative breast cancer, independent of tumor size and nuclear grade. Ginestier et al. (2002) also confirmed one-third of the predicted RNA changes in 55 breast tumors using TMA analysis of 15 marker candidates. Similarly, genomic alterations predicted by CGH microarray analyses of breast tumors, such as the association between cytokeratin 5 and 6 positivity and negative ER status, have been confirmed at the protein levels using TMAs (2002). Finally, fluorescence in situ hybridization to TMAs have been recently employed to survey chromosome 17q23 changes identified using CGH (Andersen et al., 2002). These studies clearly demonstrate the value of TMAs to confirm multiple biomarker expression at the tissue level in clinical samples.

Microarray Analysis to Identify Predictive Biomarkers

[0022] A predictive marker is defined as a biological factor which can predict clinical outcome in treated patients. Thus there are two types of questions which need to be addressed. First, who needs treatment? Prognostic factors are useful to identify a “poor prognosis” group who could benefit from treatment. The second question is of those who need treatment, which treatment should they receive? Predictive factors would be useful to answer this later question. Systemic chemotherapy for operable breast cancer significantly decreases the risk of relapse and death (Early Breast Cancer Trialists' Collaborative Group, 1998; Early Breast Cancer Trialists' Collaborative Group, 1991). However, although these large clinical trials have confirmed the value of systemic therapy, it is not possible to identify at the outset those patients who are likely to respond to adjuvant treatment or which type of treatment should be used. Thus, there is a need to identify breast cancer patients who will benefit from specific adjuvant therapies, while sparing others from the side effects of futile treatment. Unlike patients with advanced breast cancer, in whom response can be assessed by tumor measurements after a few cycles of treatment, patients with early breast cancer have no measurable disease after primary surgery. Thus, no methods are now available to separate patients likely to respond to standard adjuvant treatment from those more likely to benefit from alternative therapies. This is because can not yet answer first question, prognosis, adequately. Because of these arguments, the accepted practice is to prescribe adjuvant chemotherapy even if the expected benefit is low (Fisher et al., 1997). A good example of this practice is that give everyone with ER-positive disease tamoxifen therapy, even though know that only 60% will respond to this treatment.

[0023] Treatment given before surgery (neoadjuvant therapy) has a number of advantages in breast cancer including earlier assessment of response to therapy, and access to the primary tumor during early treatment for in vivo testing for predictive markers whose expression correlates with successful treatment. Unlike response in the metastatic setting where one can measure response at metastatic sites, but can not estimate effects on survival, response to neoadjuvant chemotherapy is a validated surrogate marker for improved survival and may be used to test the efficacy of treatment regimens. In the NSABP B-18 study, survival outcome was better in patients whose tumors responded to neoadjuvant chemotherapy compared to those who had chemotherapy-resistant disease (Fisher et al., 1998). These data indicate that tumor response to neoadjuvant chemotherapy correlates with outcome, and the response in the primary tumor mirrors the effect of chemotherapy on micrometastases (Fisher et al., 1998). Likewise, in a study involving 158 patients, clinical response to neoadjuvant chemotherapy was found to closely correlate with improved clinical outcome (Chang et al., 2000). By multivariate analysis, good clinical response to neoadjuvant chemotherapy was the only independent variable associated with decreased risk of death (Chang et al., 2000). With neoadjuvant chemotherapy, the primary breast cancer provides a unique opportunity for assessing predictive markers and for studying hypothesis-generating relationships, in that it allows for measurements of possible biologic determinants to be made before treatment in an intact human tumor.

[0024] Studies have been conducted assessing the amount of total RNA obtained from each core biopsy of primary breast cancers undergoing neoadjuvant chemotherapy for its use in expression microarray experiments. From each core biopsy, sufficient total RNA was extracted for oligonucleotide array analysis and preliminary patterns predictive of sensitivity and resistance to specific treatments have been reported (Chang et al., 2002), where others report 45% (Buchholz et al., 2002) or as high as 93% (Ellis et al., 2002) of core biopsies to yield sufficient high quality RNA for array analysis. Other investigators have reported faithful linear RNA amplification protocols using limiting amounts of RNA from microdissected breast tissues (Aoyagi et al., 2003; Zhao et al., 2002). Further work is essential in integrating amplification protocols into large-scale microarray analysis, and validating these pilot predictive expression patterns in independent patient cohorts.

[0025] A neoadjuvant approach was also undertaken by Buchholz et al. (2002) to look at the effects of chemotherapy on gene expression. The authors obtained sufficient RNA from core biopsies of 5 patients to obtain serial microarray expression profiles. Patients with good pathological responses to neoadjuvant treatment had gene profiles that clustered distinctly from those of patients who were poor responders to treatment. Unfortunately, all the patients had different gene expression changes after chemotherapy, with no single gene expression changes significantly associated with response in all 5 patients. Their result could be due in part to the small number of patients examined, and the heterogeneity of treatments in this study. However, combined neoadjuvant treatment approaches, and expression microarray technology offers a potentially clinically useful method for developing predictive tests for chemotherapy sensitivity that when validated, may reduce unnecessary treatment for women with breast cancer.

Experimental Design and Statistical Analysis

[0026] As seen above, genomic approaches can address a wide range of objectives important in breast cancer. These include, for example, molecular subclassification of breast cancer, characterization of pathways important in breast cancer etiology and progression of premalignant lesions, and prognostication of natural history or prediction of benefit to specific therapies. The first two studies focus on discovering new classes of samples or genes, while the latter two are examples of problems in classification.

[0027] At best genomic experiments can generate a gold mine of data that may, with proper “mining,” help shed light on questions far beyond those originally envisioned. At worst, without careful planning these expensive and complex experiments may fail to illuminate even their primary objectives. In all cases it is very important to minimize possible sources of confounding factors. Samples should be handled and prepared in as identical a manner as possible. Standard methods, such as blinding of samples to the laboratory staff, and processing of the samples in batches that include examples of all relevant classes, is common practice in single gene studies and is even more important here.

[0028] In clinical trials, sample sizes are planned ahead of time to ensure that the number of subjects to be enrolled will be adequate to address the question. Reporting guidelines now include planned sample sizes and target effect sizes. Traditional prognostic or predictive studies are beginning to follow suit. In sharp contrast, sample sizes in most genomic (expression arrays, CGH, SAGE) experiments to date appear to have been determined by the limited number of frozen samples available and the cost of arrays. As a result, studies have tended to be very small. In the future, as studies are undertaken that propose to change clinical practice, larger samples sizes, that are more likely to encompass the full diversity of the target population, will be required. Thus, reviews for funding of such studies are beginning to require more rigorous justification.

[0029] Study objectives also determine the most appropriate methods of analysis. To date, class discovery studies have used unsupervised methods, especially cluster analysis, to “discover” sample or gene groupings. Such studies are generally exploratory or hypothesis-generating and confirmation of results often relies on subsequent correlation with further supplemental biological or bioinformatic data. Analysis generally proceeds in steps, beginning with filtering of genes and samples to remove poor quality samples, and uninformative or poorly measured genes. This is followed by clustering or data mining designed to uncover “hidden” groups or relationships. The “significance” of such groups or relationships can be difficult to assess because any dataset, even a randomly generated one, can be clustered. Fortunately, methods have been proposed to assess the stability or reliability of the clustering that may help distinguish real from spurious results (Dudoit et al., 2002; McShane et al., 2002). To the knowledge of the inventors, there are no standard methods to determine an appropriate sample size for such studies.

[0030] Class prediction has typically been addressed with a case/control type of design (i.e. ER-positive vs. ER-negative; disease free vs. relapsed), and samples are included because of their known status. All other things being equal, the most powerful discrimination of groups is obtained when cases and controls are equally represented. Cluster analysis has sometimes been used in the analysis of such studies in the hope that groups will cluster together, but, as pointed out by Simon et al (Simon et al., 2003), unsupervised cluster analysis is not effective for class comparison or class prediction. When the goal is discrimination or the selection of features that discriminate, the analysis should make use of the available information. As with class discovery, analysis begins with filtering of genes and samples to remove poor quality samples and unexpressed or poorly measured genes. Analysis then proceeds to select a subset of “informative” genes, compute a score or index, and finally to define a classification rule. The process is often iterative, and the score may be a simple weighted average of gene expression, as in linear discriminant analysis, or a complicated non-linear function, as in artificial neural networks. However the classifier is computed and the classification rule defined, it is of little value if it cannot be shown to generalize to other samples. Performance is usually assessed by the misclassification error rate, and by summary statistics borrowed from the field of diagnostic testing, such as sensitivity, specificity, and false positive rate. “Resubstitution” estimates of classification success can be computed by classifying the same cases used to create the classifier, but the estimates are biased and often highly overly optimistic. The potential for overfitting, a well-known problem even in traditional single gene prognostic and predictor factor studies (Hilsenbeck et al., 1992; Hilsenbeck and Clark, 1996; Altman et al., 1994), is simply made worse by the huge number of explanatory variables and small sample sizes.

[0031] Classifier performance is best tested by applying it to a completely new, independent set of samples. Despite some methodologic problems, the studies of van't Veer et al and van de Vijver (2002; 2002) are ground-breaking examples. The external validation set should include all of the types of cases in the training set, and the assay process should be replicated as closely as possible. Gruvberger et al. (2002) have suggested that cases in validation sets should be carefully matched on known prognostic markers such as ERα, in part, because they were unable to discriminate good and poor outcomes in their own set of tamoxifen-treated, node-negative cases using genes from the van't Veer study (2002). This hardly seems a fair comparison—the van't Veer cases were untreated, and gene expression was not measured with the same array or reference RNA's (Gruvberger et al., 2001). It should be kept in mind that lack of assay consistency has plagued the interpretation of studies of the prognostic and predictive values of Her-2/neu and immunohistochemical assessment of hormone receptors for years. In addition, matching may cause more problems than it solves because factors used to match cannot be evaluated for their effect.

[0032] When fully independent external validation is not possible, then some other method, such a cross-validation, must be used to obtain unbiased estimates of classifier performance. Properly implemented, leave-one-out cross validation and related methods can provide nearly unbiased estimates of classifier performance. In order for the estimates to be reliable, however, it is absolutely critical that the cross-validation be external to the entire process by which the classifier is created (Simon et al., 2003; Ambroise and McLachlan, 2002). That is, in leave-one-out cross-validation, one sample is selected to left out. The entire analysis including normalization, expression estimation, filtering, gene selection, weighting, and classifier rule construction is performed on the remaining samples. The left-out sample is then processed and classified. The process is repeated leaving out and then classifying each sample in turn. Since each left-out case will be classified by a slightly different classifier, the resulting classification error is a nearly unbiased estimate of the classification error rate of the classifier construction process, not the error rate of a specific classifier. A final classifier is usually constructed by the same process, using all the data. Of course, independent validation is still important, especially if the training sample is relatively small because any estimates of accuracy will have wide confidence intervals. For example, in a study of fifty or fewer samples, a cross-validated error rate of 15% will have a 95% confidence interval of 6 to 27%, a range far too wide to guarantee good performance on future samples. While the entire multivariable classification problem is too complex for useful sample size calculations, simpler approaches can be useful. These can be based on detecting modest differences in individual genes (gene selection phase) with good power (i.e. 80-90%) at a stringent level of significance (i.e. 0.1 to 1%) that will help control for multiple comparisons. Sample size should also take into account the desired width of confidence intervals for the cross-validated or independent validation error rates.

### SUMMARY

[0033] It is the goal of comprehensive, genomic-wide approaches to identify clinically useful genetic profiles that will accurately identify diagnostic subtypes, and predict prognosis and treatment responsiveness of breast cancer patients. Clearly, the management of patients would be optimized if clinicians had a molecular profile of a patient's tumor at the time of diagnosis that would accurately identify those patients who could be spared unnecessary treatment of their disease, or alternatively whose prognosis was so poor that aggressive therapies are warranted and to pinpoint the optimal therapy. It is obvious that single gene studies have to be replaced with the newer molecular approaches of microarray analysis. Undoubtedly, the benchmark for any newly identified biomarker or biomarker DNA or RNA expression profile arising from these new microarray technologies will have to be its comparison to standard prognostic factors.

[0034] The importance of experimental design to ask the appropriate question in the available data set can not be overly stressed. Similarly, validation of generated profiles must be performed in independent data sets. The lessons learned in years of prognostic and predictive factor identification and implication need to be implemented in microarray approaches for the management of breast cancer. Obviously it is hoped that this new technology will greatly improve the ability to diagnose, and predict the outcomes of breast cancer patients. The following references generally regard the art for breast cancer prognosis.

[0035] U.S. Patent Application Publication US 2003/0198972, U.S. Patent Application Publication US 2004/0002067, U.S. Patent Application Publication US 2003/0186248, WO 03/060164, WO 03/083141, and WO 03/060470 regard breast cancer progression signatures. In particular, the signatures comprise expression of more than one gene, particularly embodied on a microarray. In specific embodiments, particular genes listed therein are present on the array.

[0036] U.S. Patent Application Publication US 2004/0058340, U.S. Patent Application Publication US 2003/0224374, and WO 02/103320 concern genetic markers for breast cancer, particularly to provide information on tumor metastasis and also particularly for detecting the presence or absence of genes identified therein, such as the estrogen receptor ESR1 and BRCA1. Other methods encompass classifying cell samples as ER(+) or ER(−).

[0037] U.S. Patent Application Publication US 2003/0236632 describes methods of determining the presence of abnormal breast cells in human subjects by identifying the increased expression of CRIP 1 or HN 1 sequences.

[0038] In light of the above, the present invention provides a novel and long-felt need for predicting resistance to a chemotherapy utilizing RNA expression profiling.

### BRIEF SUMMARY OF THE INVENTION

[0039] Breast cancer is the most common malignancy afflicting women from Western cultures. It has been estimated that approximately 211,000 women will be diagnosed with breast cancer in 2003 in the United States alone, and distressingly each year over 40,000 women will die of this disease. Developments in breast cancer molecular and cellular biology research have brought us closer to understanding the genetic basis of this disease. Unfortunately, this information has not yet to be incorporated into the routine diagnosis and treatment of breast cancer in the clinic.

[0040] Recent advances in microarray technology hold the promise of further increasing understanding of the complexity and heterogeneity of this disease, and providing new avenues for the prognostication and prediction of breast cancer outcomes. However, many of these methods compare resistant cells vs. sensitive cells in cell lines, which may be inappropriately extrapolated to molecularly distinctive in vivo tumors. Furthermore, the experimental design related to the resistant cells in known methods provides molecularly inapplicable information. The present invention employs microarray technology in an advantageous and novel manner for predictions related to breast cancer therapy.

[0041] In one embodiment of the present invention, there is a method of predicting the response of an individual to a chemotherapy, comprising the steps of providing the level of one or more expressed RNAs from an individual having tumors sensitive to the chemotherapy; providing the level of at least some of the one or more expressed RNAs from a different individual on the chemotherapy, said level from tumors that have occurred during the chemotherapy and/or tumors present in the individual before the chemotherapy but that become resistant during the chemotherapy; and comparing the level of at least one commonly expressed RNA between the individuals. In a specific embodiment, the level of one or more expressed RNAs from the tumors that have occurred during the chemotherapy or that become resistant during the chemotherapy is higher than the level of the one or more expressed RNAs in the tumors sensitive to the chemotherapy.

[0042] In some embodiments of the invention, when the level of the one or more expressed RNAs is higher in the tumors that have occurred during the chemotherapy or that become resistant during the chemotherapy, the tumors of the individual have become resistant to the chemotherapy. In a specific embodiment, the levels of one or more RNAs from an individual sensitive to the chemotherapy is provided at least in part from a known standard.

[0043] In a specific embodiment, the level of one or more expressed RNAs from the tumors that have occurred during the chemotherapy or that become resistant during the chemotherapy is lower than the level of the one or more expressed RNAs in the tumors sensitive to the chemotherapy. In some embodiments of the invention, when the level of the one or more expressed RNAs is lower in the tumors that have occurred during the chemotherapy or that become resistant during the chemotherapy, the tumors of the individual have become resistant to the chemotherapy. In a specific embodiment, the levels of one or more RNAs from an individual sensitive to the chemotherapy is provided at least in part from a known standard, for example.

[0044] In a specific embodiment, providing the level of RNAs from tumors that have occurred during the chemotherapy or that become resistant during the chemotherapy comprises the following steps: obtaining one or more cells from tumors that have occurred during the chemotherapy or that become resistant during the chemotherapy; isolating RNA from the one or more cells; and determining the level of one or more of the RNAs. In further specific embodiments, the RNA levels are determined by microarray analysis. In some aspects of the invention, the tumors that occurred during the chemotherapy occurred within about one month to about one year from initiation of the chemotherapy. In particular embodiment, the individual has breast cancer. Furthermore, the chemotherapy may be a hormone therapy, such as one that comprises tamoxifen.

[0045] In specific embodiments of the invention, the RNAs are expressed from one or more polynucleotides listed herein in Table 1, Table 2, or both. In specific embodiments, one of the expressed RNAs is DUSP6. In additional specific embodiments, when the method predicts the cancer as resistant to the chemotherapy, the individual is subjected to an alternative cancer treatment, such as one comprising chemotherapy, radiation, surgery, gene therapy, immunotherapy, hormone therapy, or a combination thereof. In additional specific embodiments, the alternative cancer treatment is chemotherapy and comprises raloxifene, ZD1839, trastuzumab, letrozole, or a combination thereof.

[0046] In another embodiment of the invention, there is as a composition of matter expressed RNAs the levels of which are indicative of resistance to a chemotherapy, wherein one or more of the expressed RNAs are listed herein in Table 1, Table 2, or both. In specific embodiments, the expressed RNAs are comprised on a substrate, such as a microarray chip. In specific embodiments, the chemotherapy comprises tamoxifen.

[0047] In an additional embodiment of the present invention, there is as a composition of matter an RNA expression profile comprising DUSP6. In particular embodiments, the level of DUSP6 is indicative of resistance to tamoxifen.

[0048] In another embodiment of the present invention, there is a method of determining resistance to a chemotherapy in the cancer of an individual, comprising the step of identifying the expression level of DUSP6 in one or more cancer cells in the individual. In a specific embodiment, the chemotherapy comprises tamoxifen. In specific embodiments, the method is further defined as comparing the level of DUSP6 in one or more cancer cells of the individual with the level of DUSP6 from one or more cells that are sensitive to the chemotherapy. In additional embodiments, when the level in the one or more cancer cells of the individual is higher than the level in one or more cells that are sensitive to the chemotherapy, a cancer of the individual is resistant to the chemotherapy. The identifying step may comprise identifying an expressed DUSP6 RNA level, and the identifying step may be further defined as comprising microarray analysis. In particular embodiments, when the cancer is resistant to the chemotherapy the method further comprises subjecting the individual to an alternative cancer treatment, such as chemotherapy, radiation, surgery, immunotherapy, hormone therapy, gene therapy, or a combination thereof.

[0049] In another embodiment of the invention, there is a method of predicting the response of an individual to a chemotherapy, comprising the steps of: providing the level of one or more expressed polynucleotides from an individual on chemotherapy, said level from tumors that grow during or after the chemotherapy; and comparing the level of one or more expressed polynucleotides to a control, wherein a difference between the level of at least one expressed polynucleotide predicts resistance to chemotherapy in the individual. In a specific embodiment, the difference between the levels is defined as being higher in the individual than the control, as being lower in the individual than the control, or a combination of expressed polynucleotides being higher or lower in the individual compared to the control. In another specific embodiment, the difference between the level of at least one expressed polynucleotide in the individual and the control is greater than about one-fold.

[0050] In particular embodiments, the individual in which resistance is predicted for is a human, although the invention is suitable for any mammal, including dogs, cats, horses, and so forth. The individual may have any cancer capable of becoming resistant to a chemotherapy, including breast cancer, lung cancer, prostate cancer, pancreatic cancer, brain cancer, skin cancer, ovarian cancer, cervical cancer, testicular cancer, liver cancer, spleen cancer, kidney cancer, colon cancer, and so forth. In preferred embodiments, the cancer is breast cancer. In further specific embodiments, the cancer is a solid tumor.

[0051] The foregoing has outlined rather broadly the features and technical advantages of the present invention in order that the detailed description of the invention that follows may be better understood. Additional features and advantages of the invention will be described hereinafter which form the subject of the claims of the invention. It should be appreciated by those skilled in the art that the conception and specific embodiment disclosed may be readily utilized as a basis for modifying or designing other structures for carrying out the same purposes of the present invention. It should also be realized by those skilled in the art that such equivalent constructions do not depart from the spirit and scope of the invention as set forth in the appended claims. The novel features which are believed to be characteristic of the invention, both as to its organization and method of operation, together with further objects and advantages will be better understood from the following description when considered in connection with the accompanying figures. It is to be expressly understood, however, that each of the figures is provided for the purpose of illustration and description only and is not intended as a definition of the limits of the present invention.

### BRIEF DESCRIPTION OF THE DRAWINGS

[0052] For a more complete understanding of the present invention, reference is now made to the following descriptions taken in conjunction with the accompanying drawings.

[0053] FIG. 1 illustrates clustering of representative genes in RNA expression profiling methods of the present invention (p=0.01).

[0054] FIG. 2 illustrates clustering of representative genes in RNA expression profiling methods of the present invention (p=0.05).

[0055] FIG. 3 demonstrates statistical differences between treatment with Tam in vector control and MKP3 overexpressing cells were determined using Student's t-test. Box and whisker plots of MKP3 RNA expression in 9 tumors. The values for minimum, maxiumum, and 25th and 75th percentiles of expression are indicated.

[0056] FIGS. 4A-4C demonstrate studies of overexpression of MKP3 related to tamoxifen resistance. In FIG. 4A, there is an immunoblot of an epitope-tagged MKP3 vector. In FIG. 4B, there is an anchorage-independent colony formation assay with MCF-7 cells harboring the MKP3 vector. In FIG. 4C, tamoxifen resistance is demonstrated in athymic mice bearing MKP3-transfected, overexpressing tumors. Estimated average log-transformed tumor size is presented as a function of time in days. Estrogen (n=6 for vector and MPK3). Tamoxifen (n=4 for vector and n=5 for MKP3).

[0057] FIGS. 5A-5H show cross-talk between MKP3, MAPK, and Erα signaling pathways. In FIG. 5A, the effect of estrogen or tamoxifen was assessed on the activation of MAPK and ERα. FIGS. 5B and 5C provide quantitation of results provided in FIG. 5A. FIG. 5D shows MKP3 enzymatic phosphastase activity in MKP3-overexpressing breast cancer cells. In FIG. 5E, there is an immunoblot analysis of MKP3 V1 and MKP3-2 transfectants treated with vehicle, E2, or Tam for 2 hours in the absence(−) or presence of PD98059. Immunoblots were stained with antibodies to V5, phospho-pMAPK and S118 ERα, or total MAPK and ERα. In FIG. 5F, an immunoblot analysis of MKP3 V1 and MKP3-2 transfectants treated with vehicle, E2, or Tam for 2 hours in the absence(−) or presence of PD98059 is provided. Immunoblots were stained with antibodies to MKP1, phosphoJNK, total JNK, p38, and total p38. In FIG. 5G, there is a phosphatase assay using pNPP as a substrate using extracts prepared from MKP3 vector 1 and MKP3-2 cells treated for 2 hours with vehicle, E2, or Tam. The nonenzymatic hydrolysis of the substrate was corrected by measuring the control vector transfected immunoprecipitates, and the MKP3 levels were corrected for this level. Phosphatase assays were performed in triplicate, n=3 separate experiments shown. In FIG. 5H, an MKP3/MAPK binding assay was performed with MKP3 V1 and MKP3-2 transfectants treated for 2 hours with ethanol vehicle (C), E2 (E), or Tam (T). Pre- and Post-V5 immunoprecipitated extracts (Pre-IP and Post-IP) were immunoblotted with antibodies to ERK2 and V5 to demonstrated levels of MAPK and MKP3, arrows respectively. Immunoglobulin heavy chain (HC) and light chain (LC) are shown.

[0058] FIG. 6 shows a comparison of NR Motifs between ERα coactivators and MKP3.

[0059] FIG. 7 studies affects of MKP3 on modulation of ERα activity using transactivation assays with estrogen-responsive luciferase reporter.

[0060] FIG. 8 demonstrates affect of MKP3 to modulate the activity of a variety of nuclear receptors using transactivation assays with estrogen-responsive reporters.

[0061] FIG. 9 shows whether MKP3 phosphatase activity is not essential for ERα activity.

[0062] FIG. 10 demonstrates whether MKP3 was a general transcriptional activator in MCF-7 cells.

[0063] FIGS. 11A-11D show immunoblot analysis for MKP3 embodiments. In FIG. 11A, there is immunoblot analysis of two vector control (Con 1 and 2), and two MKP3-overexpressing transfectants (MKP3-1 and 2) treated for 2 hours with ethanol vehicle (C), E2 (E), or Tam (T). Immunoblots were stained with antibodies to CCND1, PR-A and β forms, AIB, and anti-Rho GDI as a loading control. In FIG. 11B, there is a densitometric scan of the immunoblot in panel A showing levels of CCND1 normalized to Rho GDI levels. In FIG. 11C, there is an immunoblot analysis of MKP3 V1 and MKP3-2 transfectants treated with vehicle, E2, or Tam for 2 hours in the absence(−) or presence of PD98059. Immunoblots were stained with antibodies to CCND1, PR, and ERK2 as a loading control. In FIG. 11D, PR ubiquitin assay was performed in MCF-7 cells transiently transfected with expression vectors for ubiquitin (pcDNA-HA-ubiquitin), MKP3-V5, and PR-B (pcDNA 3.1-PR-B), and treated for 2 hours with ethanol vehicle (C), E2 (E), or Tarn (T). The upper panels are immunoprecipitates resolved by SDS-PAGE, and immunoblotted with anti-HA antibody. The same blot was then stripped and reimmunoblotted with anti-PR antibody to demonstrate the levels of introduced PR-B in the lower panel.

[0064] FIG. 12 illustrates identification of altered gene expression associated with exemplary tamoxifen resistance in breast tumors.

[0065] FIG. 13 demonstrates comparison of EBP50 RNA levels in tamoxifen-sensitive and tamoxifen-resistant breast tumors.

[0066] FIG. 14 shows that overexpression of MTA2 in T47D cells is associated with hormone-independent and tamoxifen-resistant growth in soft agar.

[0067] FIG. 15 shows decreased expression of EBP50 in MTA2 overexpressing T47D cells.

[0068] FIGS. 16A and 16B show that EBP50 binds to HER2.

[0069] FIGS. 17A and 17B demonstrates that EBP50 overexpression enhances ERα activity.

[0070] FIG. 18 illustrates an exemplary model for a role for EBP50 in tamoxifen resistance.

[0071] FIG. 19 shows that RhoGDI represses exogenous ERα activity in Hela cells.

[0072] FIG. 20 demonstrates that RhoGDI represses endogenous ERα activity in MCF-7 breast cancer cells.

[0073] FIG. 21 shows that RhoGDI decreases the acetylation of ERα level in vivo.

[0074] FIG. 22 shows that RhoGDIα is an in vitro substrate of p300 HAT activity.

[0075] FIG. 23 demonstrates that RhoGDI exhibits no intrinsic HAT activity.

[0076] FIG. 24 shows that RhoGDI is acetylated in vivo.

[0077] FIG. 25 demonstrates that the N-terminal region of RhoGDI comprises acetylation site(s).

[0078] FIG. 26 shows that RhoGDI decreases ERα access to p300 HAT.

[0079] FIG. 27 shows that RhoGDI inhibits p300 acetylation of ERα in vitro.

[0080] FIG. 28 demonstrates RhoGDI association with ER in vivo.

[0081] FIG. 29 demonstrates that RhoGDI does not bind to ER directly.

[0082] FIG. 30 provides an exemplary model for a role of RhoGDI associated with ER.

[0083] FIGS. 31A and 31B show that RhoGDI confers resistance to tamoxifen.

### DETAILED DESCRIPTION OF THE INVENTION

[0084] I. Definitions

[0085] As used herein the specification, “a” or “an” may mean one or more. As used herein in the claim(s), when used in conjunction with the word “comprising”, the words “a” or “an” may mean one or more than one. As used herein “another” may mean at least a second or more. Some embodiments of the invention may consist of or consist essentially of one or more elements, method steps, and/or methods of the invention. It is contemplated that any method or composition described herein can be implemented with respect to any other method or composition described herein.

[0086] The term “expressed RNAs” as used herein refers to RNAs that are transcribed from a polynucleotide. In specific embodiments, the polynucleotide is a gene, such as a gene on a chromosome or mitochondrial DNA. In further embodiments, the expressed RNAs may be isolated from one or more cancer cells, such as one or more cancer cells suspected of being resistant to a hormonal therapy or that are known to be resistant to a hormone therapy. In specific embodiments, the level of the expressed RNA may be determined by determining the level of the RNA molecule or by determining the level of a polypeptide translated from the expressed RNA, such as determining the level by immunoblot, for example.

[0087] The term “microarray” as used herein refers to a collection of expressed RNAs, in particular comprised on a substrate, such as a microchip.

[0088] The terms “overexpress,” “overexpressed,” or overexpressing” as used herein refers to the level of expression of an RNA being greater than one fold higher compared to a control sample, for example.

[0089] The term “predicting” as used herein refers to identifying a chance of developing or having resistance to a chemotherapy.

[0090] The term “resistance” as used herein refers to when a tumor starts growing during or after treatment.

[0091] The term “RNA expression profiling” or “RNA expression profile” as used herein refers to collecting information from a plurality of expressed genes in the form of RNA transcripts, or the collection thereof, respectively. In alternative embodiments, the gene product of the RNA is assayed for information. In specific embodiments, the plurality of RNA transcripts provides information related to breast cancer therapy. In additional specific embodiments, the information gleaned from profiling facilitates determination of a breast cancer therapy, such as whether or not to employ a particular therapy, for example a hormone therapy. In further embodiments, the hormone therapy is related to estrogen, such as the therapy being an estrogen inhibitor, for example tamoxifen. In particular embodiments, the collection of expressed genes is compared between two samples, and in specific embodiments those samples are from one or more individuals having tamoxifen sensitive tumors and a sample from an individual having metastatic tumors occurring during a particular chemotherapy treatment. In specific embodiments, the comparison provides information whether or not a particular chemotherapy treatment should be utilized or continued for the individual.

[0092] The term “tamoxifen-resistant” as used herein refers to a tumor, including the individual cells therein, that is or becomes refractory to treatment by tamoxifen. In specific embodiments, the tamoxifen-resistant tumor becomes resistant to tamoxifen treatment after initiation of the treatment and may occur during the treatment. In further specific embodiments, the resistance to tamoxifen manifests at about 2-24 months while the patient is taking hormonal therapy. In de novo resistance, the patient does not respond to initial therapy. Acquired resistance is where the patient develops metastatic disease during therapy. In additional specific embodiments, resistance to tamoxifen is the result of one or more genes being overexpressed and/or underexpressed, compared to non-cancerous cells of the same tissue.

[0093] The term “tamoxifen-sensitive” as used herein refers to a tumor, including the individual cells therein, that is treatable with tamoxifen. In specific embodiments, the tamoxifen-sensitive tumor remains sensitive during the treatment. In further specific embodiments, the tamoxifen-sensitive tumor is still sensitive up to at least about seven to ten years.

[0094] The terms “underexpress,” “underexpressed,” or underexpressing” as used herein refers to the level of expression of an RNA being less than one fold higher compared to a control sample, for example.

[0095] II. The Present Invention

[0096] The present invention concerns the prediction of response to cancer therapy, such as hormone therapy in breast cancer patients, for example, using RNA expression profiling. In particular, information obtained from the present invention will assist a health care provider in determining whether or not a tumor (including cells therein) will become resistant to the hormone therapy or are already resistant to the hormone therapy. In specific embodiments, the present invention will provide direction whether or not to continue with hormone therapy, such as to add or change the cancer therapy. In particular aspects of the invention, tamoxifen is the exemplary embodiment described for illustrative purposes only, and a skilled artisan recognizes that the invention can be utilized for other chemotherapeutic drugs also, including other hormone therapy drugs.

[0097] Acquired resistance to hormone therapy such as tamoxifen is well-known in the art. In particular, breast cancer patients while undergoing treatment with tamoxifen have recurrence of the disease. In specific embodiments, the disease metastasizes during therapy with tamoxifen, thereafter to be considered a resistant metastases. The present invention predicts the occurrence of metastases, provides information concerning present metastases and/or prevents additional mestastases by identifying tumors susceptible to becoming resistant or being resistant. In other words, the present invention identifies novel genes that cause or impact on resistance, thereby providing information for specific therapies that are developed for these genes. Furthermore, the genes identified by methods of the present invention are useful as biomarkers to avoid hormonal therapies, such as antiestrogens, including tamoxifen, raloxifene (Evista), and/or fulvestrant, for example, if the likelihood of developing resistance exists.

[0098] In particular, the present invention employs an RNA expression profile (which may also be referred to as a gene expression profile), to predict a response to a drug therapy, such as tamoxifen, in breast cancer patients. In specific embodiments, the present invention encompasses molecular events related to resistance, which may also be referred to as adaptive resistance. In particular, the polynucleotides may already be expressed, but their levels change in response to therapy. In specific embodiments, the levels of the polynucleotides become changed or altered when resistance develops.

[0099] In the art, many researchers employ microarray experiments designed to compare biologically disparate embodiments by evaluating primary tumors after cessation of tamoxifen resistance in comparison to tamoxifen-sensitive tumors. Specifically, gene expression in tamoxifen-sensitive tumors (such as those which have not recurred at about 10 years following initial diagnosis) is compared to gene expression in tamoxifen-resistant tumors (such as those recurring during treatment).

[0100] Alternatively, and advantageously, the present invention employs RNA expression profiling to compare biologically appropriate embodiments by evaluating metastatic tumors during tamoxifen treatment. Specifically, gene expression in tamoxifen-sensitive tumors (such as those that have not recurred at about 10 years following initial diagnosis) is compared to gene expression in tamoxifen-resistant tumors (such as those that recur in less than 2 years during tamoxifen treatment) still being treated with tamoxifen. The invention exploits the biological characteristic of metastatic tumors being molecularly different than the primary tumors because the metastatic tumor has been treated chemically, such as with a drug, for example tamoxifen. The metastatic tumors are molecularly different compared to primary tumors and/or tumors never exposed to tamoxifen because different gene expression patterns manifest as a result of the tamoxifen exposure. Thus, the microarray of the present invention is directed to the metastatic tumors that arose while the patients were on the drug tamoxifen. In specific embodiments, when tamoxifen is used in advanced disease resistance will eventually arise in all tumors, even if they were initially sensitive, and the present invention is useful therein.

[0101] In particular embodiments, the individual in which resistance is predicted for is a human, although the invention is suitable for any mammal, including dogs, cats, horses, and so forth. The individual may have any cancer capable of becoming resistant to a chemotherapy, including breast cancer, lung cancer, prostate cancer, pancreatic cancer, brain cancer, skin cancer, ovarian cancer, cervical cancer, testicular cancer, liver cancer, spleen cancer, kidney cancer, colon cancer, and so forth. In preferred embodiments, the cancer is breast cancer. In further specific embodiments, the cancer is a solid tumor.

[0102] In the present invention, MKP3 (also referred to as DUSP6) was found to be expressed in Tam-resistant metastatic breast tumors using expression microarray and qRT/PCR analysis. The present inventors have studied the effects of MKP3 overexpression on the development of TR in ERα-positive MCF-7 human breast cancer cells. The present inventors also examined the molecular cross-talk between MAPK and ERα in TR, and investigated MKP3's effects on downstream targets of ERα signaling. Finally, one embodiment of the present invention comprises a unique feedback loop between MKP3 and ERK 1,2 MAPK that was generated by Tam treatment of MKP3-overexpressing cells. In specific embodiments, an “off-off” mechanism of TR involving the disengagement of the MKP3 negative feedback loop results in sustained MAPK activation in the presence of Tam. Thus, in specific embodiments of the invention, MKP3 impacts on ERα and MAPK function in breast cancer cells, and in additional embodiments a resultant feedback loop impacts on the generation of TR.

[0103] In additional embodiments of the invention, the levels of the polynucleotides EBP50 and RhoGDIa were indicative of development of resistance to breast cancer therapy.

[0104] III. RNA Expression Profiling and RNA Expression Profiles

[0105] The RNAs that are indicative of the corresponding predictive response to a chemotherapeutic, such as tamoxifen, in exemplary embodiments, may be any expressed RNA or RNAs that assist in the evaluation of the response of a breast cancer patient to the chemotherapeutic, including tamoxifen, for example. The expression profile may indicate those tumors that are or will become sensitive to tamoxifen.

[0106] In specific embodiments using methods described herein, FIG. 1 shows a supervised cluster of array data at p>0.01 level of significance and table of genes at this p value (Table 1 with n=98 genes) for an exemplary RNA expression profiling study related to tamoxifen resistance. Table 1 lists the expressed genes in no particular order, and exemplary sequences are provided in the accompanying sequence listing. The first column comprises proprietary numbers. The column concerning “Fold difference of geom means” refers to the geometric mean in the TS group being compared to the geometric mean in the TR group by dividing the TR mean by the TS mean=the fold difference. The Probe set refers to the number given by Affymetrix (Santa Clara, Calif.) for each polynucleotide; the identifier of the sequence is the probe set.

TABLE 1
Genes Identified by Tamoxifen Resistance Expression Analysis (p = 0.01)

| | Fold | | | |
|---|---|---|---|---|
| | difference | | | |
| | of geom | | | |
| | means | Probe set | Description | Gene symbol |
| 65 | 3.178 | 1916_s_at | v-fos FBJ murine | FOS (SEQ ID NO: 1) |
| | | | osteosarcoma viral | |
| | | | oncogene homolog | |
| 88 | 2.874 | 38317_at | transcription elongation | TCEAL1 (SEQ ID NO: 2) |
| | | | factor A (SII)-like 1 | |
| 36 | 2.846 | 39969_at | histone 1, H4c | HIST1H4C (SEQ ID NO: 3) |
| 10 | 2.345 | 37221_at | protein kinase, cAMP- | PRKAR2B (SEQ ID NO: 4) |
| | | | dependent, regulatory, | |
| | | | type II, beta | |
| 71 | 2.29 | 41193_at | dual specificity | DUSP6 (SEQ ID NO: 5) |
| | | | phosphatase 6 | |
| 4 | 2.182 | 39072_at | MAX interactor 1 | MXI1 (SEQ ID NO: 6) |
| 12 | 2.106 | 31792_at | annexin A3 | ANXA3 (SEQ ID NO: 7) |
| 23 | 2.103 | 1577_at | androgen receptor | AR (SEQ ID NO: 8) |
| | | | (dihydrotestosterone | |
| | | | receptor; testicular | |
| | | | feminization; spinal and | |
| | | | bulbar muscular atrophy; | |
| | | | Kennedy disease) | |
| 24 | 2.057 | 39032_at | transforming growth factor | TGFB1I4 (SEQ ID NO: 9) |
| | | | beta 1 induced transcript 4 | |
| 96 | 2.04 | 654_at | MAX interactor 1 | MXI1 (SEQ ID NO: 6) |
| 26 | 1.897 | 1237_at | immediate early response 3 | IER3 (SEQ ID NO: 10) |
| 87 | 1.836 | 38375_at | esterase | ESD (SEQ ID NO: 11) |
| | | | D/formylglutathione | |
| | | | hydrolase | |
| 48 | 1.788 | 35705_at | nuclear receptor subfamily | NR1D2 (SEQ ID NO: 12) |
| | | | 1, group D, member 2 | |
| 40 | 1.703 | 33436_at | SRY (sex determining | SOX9 (SEQ ID NO: 13) |
| | | | region Y)-box 9 | |
| | | | (campomelic dysplasia, | |
| | | | autosomal sex-reversal) | |
| 52 | 1.688 | 1909_at | B-cell CLL/lymphoma 2 | BCL2 (SEQ ID NO: 14) |
| 21 | 1.687 | 41690_at | AT rich interactive domain | ARID5B (SEQ ID NO: 15) |
| | | | 5B (MRF1-like) | |
| 57 | 1.684 | 41141_at | protein-kinase, interferon- | PRKRIR (SEQ ID NO: 16) |
| | | | inducible double stranded | |
| | | | RNA dependent inhibitor, | |
| | | | repressor of (P58 | |
| | | | repressor) | |
| 68 | 1.672 | 31800_at | MRNA; cDNA | |
| | | | DKFZp586L141 (from | |
| | | | clone DKFZp586L141) | |
| 25 | 1.666 | 40838_at | zinc finger protein 292 | ZNF292 (SEQ ID NO: 17) |
| 79 | 1.655 | 36097_at | immediate early response 2 | IER2 (SEQ ID NO: 18) |
| 51 | 1.587 | 34819_at | CD164 antigen, | CD164 (SEQ ID NO: 19) |
| | | | sialomucin | |
| 66 | 1.579 | 38764_at | Dicer1, Dcr-1 homolog | DICER1 (SEQ ID NO: 20) |
| | | | (Drosophila) | |
| 83 | 1.572 | 37294_at | B-cell translocation gene | BTG1 (SEQ ID NO: 21) |
| | | | 1, anti-proliferative | |
| 59 | 1.566 | 35748_at | eukaryotic translation | EEF1B2 (SEQ ID NO: 22) |
| | | | elongation factor 1 beta 2 | |
| 29 | 1.559 | 37661_at | ATPase, Ca++ | ATP2B1 (SEQ ID NO: 23) |
| | | | transporting, plasma | |
| | | | membrane 1 | |
| 31 | 1.542 | 39028_at | karyopherin (importin) | KPNB3 (SEQ ID NO: 24) |
| | | | beta 3 | |
| 2 | 1.541 | 38049_g_at | RNA binding protein with | RBPMS (SEQ ID NO: 25) |
| | | | multiple splicing | |
| 28 | 1.54 | 38765_at | Dicer1, Dcr-1 homolog | DICER1 (SEQ ID NO: 20) |
| | | | (Drosophila) | |
| 15 | 1.531 | 38242_at | B-cell linker | BLNK (SEQ ID NO: 26) |
| 61 | 1.529 | 33847_s_at | cyclin-dependent kinase | CDKN1B (SEQ ID NO: 27) |
| | | | inhibitor 1B (p27, Kip1) | |
| 14 | 1.528 | 38663_at | barrier to autointegration | BANF1 (SEQ ID NO: 28) |
| | | | factor 1 | |
| 7 | 1.526 | 38568_at | topoisomerase I binding, | TOPORS (SEQ ID NO: 29) |
| | | | arginine/serine-rich | |
| 19 | 1.523 | 37162_at | coiled-coil domain | CCDC6 (SEQ ID NO: 30) |
| | | | containing 6 | |
| 76 | 1.503 | 39731_at | RNA binding motif protein, | RBMX (SEQ ID NO: 31) |
| | | | X-linked | |
| 89 | 1.493 | 38674_at | KIAA1354 protein | KIAA1354 (SEQ ID NO: 32) |
| 32 | 1.489 | 32219_at | tousled-like kinase 1 | TLK1 (SEQ ID NO: 33) |
| 46 | 1.479 | 36980_at | proline-rich nuclear | PNRC1 (SEQ ID NO: 34) |
| | | | receptor coactivator 1 | |
| 41 | 1.478 | 38581_at | Clone IMAGE: 5289004, | |
| | | | mRNA | |
| 92 | 1.453 | 1258_s_at | excision repair cross- | ERCC4 (SEQ ID NO: 35) |
| | | | complementing rodent | |
| | | | repair deficiency, | |
| | | | complementation group 4 | |
| 16 | 1.45 | 37316_r_at | chromosome 14 open | C14orf11 (SEQ ID NO: 36) |
| | | | reading frame 11 | |
| 3 | 1.443 | 37994_at | fragile X mental | FMR1 (SEQ ID NO: 37) |
| | | | retardation 1 | |
| 81 | 1.429 | 40457_at | splicing factor, | SFRS3 (SEQ ID NO: 38) |
| | | | arginine/serine-rich 3 | |
| 45 | 1.427 | 41152_f_at | ribosomal protein L36a- | RPL36AL (SEQ ID NO: 39) |
| | | | like | |
| 42 | 1.423 | 32752_at | NADH dehydrogenase | NDUFA7 (SEQ ID NO: 40) |
| | | | (ubiquinone) 1 alpha | |
| | | | subcomplex, 7, 14.5 kDa | |
| 35 | 1.416 | 41533_at | hypothetical protein | MGC39325 (SEQ ID |
| | | | MGC39325 | NO: 41) |
| 85 | 1.412 | 38659_at | soc-2 suppressor of clear | SHOC2 (SEQ ID NO: 42) |
| | | | homolog (C. elegans) | |
| 30 | 1.404 | 36571_at | topoisomerase (DNA) II | TOP2B (SEQ ID NO: 43) |
| | | | beta 180 kDa | |
| 17 | 1.401 | 38368_at | dUTP pyrophosphatase | DUT (SEQ ID NO: 44) |
| 94 | 1.396 | 35677_at | hypothetical protein | MGC9084 (SEQ ID NO: 45) |
| | | | MGC9084 | |
| 93 | 1.394 | 40086_at | KIAA0261 | KIAA0261 (SEQ ID NO: 46) |
| 67 | 1.377 | 39091_at | cytoskeleton related | JWA (SEQ ID NO: 47) |
| | | | vitamin A responsive | |
| | | | protein | |
| 75 | 1.373 | 40045_g_at | chromosome 18 open | C18orf1 (SEQ ID NO: 48) |
| | | | reading frame 1 | |
| 54 | 1.368 | 38892_at | KIAA0240 | KIAA0240 (SEQ ID NO: 49) |
| 47 | 1.358 | 34699_at | CD2-associated protein | CD2AP (SEQ ID NO: 50) |
| 64 | 1.337 | 32857_at | Ras association | RASSF3 (SEQ ID NO: 51) |
| | | | (RalGDS/AF-6) domain | |
| | | | family 3 | |
| 55 | 1.31 | 38119_at | glycophorin C (Gerbich | GYPC (SEQ ID NO: 52) |
| | | | blood group) | |
| 63 | 1.31 | 36033_at | splicing factor, | SFRS12 (SEQ ID NO: 53) |
| | | | arginine/serine-rich 12 | |
| 86 | 1.306 | 41343_at | CDP-diacylglycerol | CDS2 (SEQ ID NO: 54) |
| | | | synthase (phosphatidate | |
| | | | cytidylyltransferase) 2 | |
| 72 | 1.301 | 41573_at | Sp3 transcription factor | SP3 (SEQ ID NO: 55) |
| 70 | 1.296 | 35739_at | myotubularin related | MTMR3 (SEQ ID NO: 56) |
| | | | protein 3 | |
| 58 | 1.287 | 41457_at | KIAA0423 | KIAA0423 (SEQ ID NO: 57) |
| 82 | 1.283 | 32169_at | F-box only protein 21 | FBXO21 (SEQ ID NO: 58) |
| 50 | 1.276 | 41595_at | KIAA0947 protein | KIAA0947 (SEQ ID NO: 59) |
| 78 | 1.274 | 33348_at | transcription factor 12 | TCF12 (SEQ ID NO: 60) |
| | | | (HTF4, helix-loop-helix | |
| | | | transcription factors 4) | |
| 74 | 1.248 | 37361_at | fibroblast growth factor | FIBP (SEQ ID NO: 61) |
| | | | (acidic) intracellular | |
| | | | binding protein | |
| 62 | 0.767 | 882_at | colony stimulating factor 1 | CSF1 (SEQ ID NO: 62) |
| | | | (macrophage) | |
| 60 | 0.754 | 35309_at | suppression of | ST14 (SEQ ID NO: 63) |
| | | | tumorigenicity 14 (colon | |
| | | | carcinoma, matriptase, | |
| | | | epithin) | |
| 22 | 0.751 | 33863_at | hypoxia up-regulated 1 | HYOU1 (SEQ ID NO: 64) |
| 56 | 0.739 | 38281_at | caspase 7, apoptosis- | CASP7 (SEQ ID NO: 65) |
| | | | related cysteine protease | |
| 39 | 0.737 | 32566_at | chondroitin polymerizing | CHPF (SEQ ID NO: 66) |
| | | | factor | |
| 53 | 0.711 | 40237_at | pleckstrin homology-like | PHLDA2 (SEQ ID NO: 67) |
| | | | domain, family A, member 2 | |
| 98 | 0.704 | 1933_g_at | ATP-binding cassette, | ABCC5 (SEQ ID NO: 68) |
| | | | sub-family C | |
| | | | (CFTR/MRP), member 5 | |
| 37 | 0.699 | 33212_at | ribosome binding protein 1 | RRBP1 (SEQ ID NO: 69) |
| | | | homolog 180 kDa (dog) | |
| 77 | 0.698 | 1644_at | eukaryotic translation | EIF3S2 (SEQ ID NO: 70) |
| | | | initiation factor 3, subunit | |
| | | | 2 beta, 36 kDa | |
| 27 | 0.681 | 33667_at | peptidylprolyl isomerase A | PPIA (SEQ ID NO: 71) |
| | | | (cyclophilin A) | |
| 18 | 0.672 | 38760_f_at | butyrophilin, subfamily 3, | BTN3A2 (SEQ ID NO: 72) |
| | | | member A2 | |
| 43 | 0.671 | 38969_at | chromosome 19 open | C19orf10 (SEQ ID NO: 73) |
| | | | reading frame 10 | |
| 69 | 0.651 | 40116_at | phosphofructokinase, liver | PFKL (SEQ ID NO: 74) |
| 97 | 0.63 | 40164_at | Rho GDP dissociation | ARHGDIA (SEQ ID NO: 75) |
| | | | inhibitor (GDI) alpha | |
| 33 | 0.615 | 32116_at | epidermodysplasia | EVER1 (SEQ ID NO: 76) |
| | | | verruciformis 1 | |
| 49 | 0.614 | 32332_at | isocitrate dehydrogenase | IDH2 (SEQ ID NO: 77) |
| | | | 2 (NADP+), mitochondrial | |
| 9 | 0.589 | 41220_at | MLL septin-like fusion | MSF (SEQ ID NO: 78) |
| 8 | 0.57 | 40290_f_at | sialyltransferase 4A (beta- | SIAT4A (SEQ ID NO: 79) |
| | | | galactoside alpha-2,3- | |
| | | | sialyltransferase) | |
| 5 | 0.569 | 32378_at | pyruvate kinase, muscle | PKM2 (SEQ ID NO: 80) |
| 6 | 0.562 | 36614_at | heat shock 70 kDa protein | HSPA5 (SEQ ID NO: 81) |
| | | | 5 (glucose-regulated | |
| | | | protein, 78 kDa) | |
| 34 | 0.54 | 34885_at | synaptogyrin 2 | SYNGR2 (SEQ ID NO: 82) |
| 90 | 0.535 | 37920_at | paired-like homeodomain | PITX1 (SEQ ID NO: 83) |
| | | | transcription factor 1 | |
| 44 | 0.501 | 31960_f_at | G antigen 2 | GAGE2 (SEQ ID NO: 84) |
| 84 | 0.495 | 37383_f_at | major histocompatibility | HLA-C (SEQ ID NO: 85) |
| | | | complex, class I, C | |
| 95 | 0.49 | 37741_at | pyrroline-5-carboxylate | PYCR1 (SEQ ID NO: 86) |
| | | | reductase 1 | |
| 20 | 0.487 | 39708_at | signal transducer and | STAT3 (SEQ ID NO: 87) |
| | | | activator of transcription 3 | |
| | | | (acute-phase response | |
| | | | factor) | |
| 73 | 0.471 | 32174_at | solute carrier family 9 | SLC9A3R1 (also referred to |
| | | | (sodium/hydrogen | as EBP50; SEQ ID NO: 88) |
| | | | exchanger), isoform 3 | |
| | | | regulator 1 | |
| 1 | 0.45 | 41045_at | secreted and | SECTM1 (SEQ ID NO: 89) |
| | | | transmembrane 1 | |
| 80 | 0.395 | 36454_at | carbonic anhydrase XII | CA12 (SEQ ID NO: 90) |
| 11 | 0.294 | 35174_i_at | eukaryotic translation | EEF1A2 (SEQ ID NO: 91) |
| | | | elongation factor 1 alpha 2 | |
| 91 | 0.29 | 39781_at | insulin-like growth factor | IGFBP4 (SEQ ID NO: 92) |
| | | | binding protein 4 | |
| 38 | 0.281 | 1737_s_at | insulin-like growth factor | IGFBP4 (SEQ ID NO: 92) |
| | | | binding protein 4 | |
| 13 | 0.195 | 36681_at | apolipoprotein D | APOD (SEQ ID NO: 93) |

[0107] FIG. 2 shows an exemplary cluster at p=0.05 from the inventive microarray analysis, and Table 2 lists characteristic genes (n=155) identified at this level of significance. The genes are listed in no particular order, and exemplary sequences are provided in the accompanying sequence listing.

TABLE 2
Genes Identified by Tamoxifen Resistance Expression Analysis (p > 0.05)

| | Fold | | | |
|---|---|---|---|---|
| | difference | | | |
| | of geom | | | |
| | means | Probe set | Description | Gene symbol |
| 88 | 2.874 | 38317_at | transcription elongation | TCEAL1 (SEQ ID NO: 2) |
| | | | factor A (SII)-like 1 | |
| 320 | 2.762 | 36925_at | heat shock 70 kDa protein 2 | HSPA2 (SEQ ID NO: 94) |
| 10 | 2.345 | 37221_at | protein kinase, cAMP- | PRKAR2B (SEQ ID NO: 4) |
| | | | dependent, regulatory, | |
| | | | type II, beta | |
| 155 | 2.304 | 843_at | protein tyrosine | PTP4A1 (SEQ ID NO: 95) |
| | | | phosphatase type IVA, | |
| | | | member 1 | |
| 4 | 2.182 | 39072_at | MAX interactor 1 | MXI1 (SEQ ID NO: 6) |
| 12 | 2.106 | 31792_at | annexin A3 | ANXA3 (SEQ ID NO: 7) |
| 23 | 2.103 | 1577_at | androgen receptor | AR (SEQ ID NO: 8) |
| | | | (dihydrotestosterone | |
| | | | receptor; testicular | |
| | | | feminization; spinal and | |
| | | | bulbar muscular atrophy; | |
| | | | Kennedy disease) | |
| 24 | 2.057 | 39032_at | transforming growth factor | TGFB1I4 (SEQ ID NO: 9) |
| | | | beta 1 induced transcript 4 | |
| 96 | 2.04 | 654_at | MAX interactor 1 | MXI1 (SEQ ID NO: 6) |
| 135 | 1.942 | 1295_at | v-rel reticuloendotheliosis | RELA (SEQ ID NO: 96) |
| | | | viral oncogene homolog A, | |
| | | | nuclear factor of kappa | |
| | | | light polypeptide gene | |
| | | | enhancer in B-cells 3, p65 | |
| | | | (avian) | |
| 26 | 1.897 | 1237_at | immediate early response 3 | IER3 (SEQ ID NO: 10) |
| 127 | 1.881 | 36645_at | v-rel reticuloendotheliosis | RELA (SEQ ID NO: 96) |
| | | | viral oncogene homolog A, | |
| | | | nuclear factor of kappa | |
| | | | light polypeptide gene | |
| | | | enhancer in B-cells 3, p65 | |
| | | | (avian) | |
| 183 | 1.877 | 38985_at | leptin receptor overlapping | LEPROTL1 (SEQ ID NO: 97) |
| | | | transcript-like 1 | |
| 87 | 1.836 | 38375_at | esterase | ESD (SEQ ID NO: 11) |
| | | | D/formylglutathione | |
| | | | hydrolase | |
| 119 | 1.763 | 37908_at | guanine nucleotide | GNG11 (SEQ ID NO: 98) |
| | | | binding protein (G | |
| | | | protein), gamma 11 | |
| 52 | 1.688 | 1909_at | B-cell CLL/lymphoma 2 | BCL2 (SEQ ID NO: 14) |
| 122 | 1.688 | 40868_at | hypothetical protein | FLJ20274 (SEQ ID NO: 99) |
| | | | FLJ20274 | |
| 21 | 1.687 | 41690_at | AT rich interactive domain | ARID5B (SEQ ID NO: 15) |
| | | | 5B (MRF1-like) | |
| 57 | 1.684 | 41141_at | Protein-kinase, interferon- | PRKRIR (SEQ ID NO: 16) |
| | | | inducible double stranded | |
| | | | RNA dependent inhibitor, | |
| | | | repressor of (P58 | |
| | | | repressor) | |
| 68 | 1.672 | 31800_at | MRNA; cDNA | |
| | | | DKFZp586L141 (from | |
| | | | clone DKFZp586L141) | |
| 25 | 1.666 | 40838_at | zinc finger protein 292 | ZNF292 (SEQ ID NO: 17) |
| 79 | 1.655 | 36097_at | immediate early response 2 | IER2 (SEQ ID NO: 18) |
| 111 | 1.624 | 36514_at | cell growth regulator with | CGRRF1 (SEQ ID NO: 100) |
| | | | ring finger domain 1 | |
| 151 | 1.62 | 2036_s_at | CD44 antigen (homing | CD44 (SEQ ID NO: 101) |
| | | | function and Indian blood | |
| | | | group system) | |
| 51 | 1.587 | 34819_at | CD164 antigen, | CD164 (SEQ ID NO: 19) |
| | | | sialomucin | |
| 66 | 1.579 | 38764_at | Dicer1, Dcr-1 homolog | DICER1 (SEQ ID NO: 20) |
| | | | (Drosophila) | |
| 29 | 1.559 | 37661_at | ATPase, Ca++ | ATP2B1 (SEQ ID NO: 23) |
| | | | transporting, plasma | |
| | | | membrane 1 | |
| 31 | 1.542 | 39028_at | karyopherin (importin) | KPNB3 (SEQ ID NO: 24) |
| | | | beta 3 | |
| 188 | 1.542 | 41542_at | zinc finger protein 216 | ZNF216 (SEQ ID NO: 102) |
| 303 | 1.542 | 40859_at | nuclear protein UKp68 | FLJ11806 (SEQ ID NO: 103) |
| 2 | 1.541 | 38049_g_at | RNA binding protein with | RBPMS (SEQ ID NO: 25) |
| | | | multiple splicing | |
| 28 | 1.54 | 38765_at | Dicer1, Dcr-1 homolog | DICER1 (SEQ ID NO: 20) |
| | | | (Drosophila) | |
| 15 | 1.531 | 38242_at | B-cell linker | BLNK (SEQ ID NO: 26) |
| 14 | 1.528 | 38663_at | barrier to autointegration | BANF1 (SEQ ID NO: 28) |
| | | | factor 1 | |
| 7 | 1.526 | 38568_at | topoisomerase I binding, | TOPORS (SEQ ID NO: 29) |
| | | | arginine/serine-rich | |
| 19 | 1.523 | 37162_at | coiled-coil domain | CCDC6 (SEQ ID NO: 30) |
| | | | containing 6 | |
| 113 | 1.521 | 40066_at | ubiquitin-activating | UBE1C (SEQ ID NO: 104) |
| | | | enzyme E1C (UBA3 | |
| | | | homolog, yeast) | |
| 179 | 1.518 | 39806_at | ASF1 anti-silencing | ASF1A (SEQ ID NO: 105) |
| | | | function 1 homolog A (S. cerevisiae) | |
| 125 | 1.509 | 37723_at | cyclin G2 | CCNG2 (SEQ ID NO: 106) |
| 32 | 1.489 | 32219_at | tousled-like kinase 1 | TLK1 (SEQ ID NO: 33) |
| 120 | 1.482 | 34445_at | expressed in | HHL (SEQ ID NO: 107) |
| | | | hematopoietic cells, heart, | |
| | | | liver | |
| 41 | 1.478 | 38581_at | Clone IMAGE: 5289004, | |
| | | | mRNA | |
| 176 | 1.476 | 39132_at | SWI/SNF related, matrix | SMARCA5 (SEQ ID |
| | | | associated, actin | NO: 108) |
| | | | dependent regulator of | |
| | | | chromatin, subfamily a, | |
| | | | member 5 | |
| 92 | 1.453 | 1258_s_at | excision repair cross- | ERCC4 (SEQ ID NO: 35) |
| | | | complementing rodent | |
| | | | repair deficiency, | |
| | | | complementation group 4 | |
| 336 | 1.452 | 1817_at | prefoldin 5 | PFDN5 (SEQ ID NO: 109) |
| 100 | 1.451 | 32165_at | splicing factor, | SFRS7 (SEQ ID NO: 110) |
| | | | arginine/serine-rich 7, | |
| | | | 35 kDa | |
| 16 | 1.45 | 37316_r_at | chromosome 14 open | C14orf11 (SEQ ID NO: 36) |
| | | | reading frame 11 | |
| 3 | 1.443 | 37994_at | fragile × mental | FMR1 (SEQ ID NO: 37) |
| | | | retardation 1 | |
| 45 | 1.427 | 41152_f_at | ribosomal protein L36a- | RPL36AL (SEQ ID NO: 39) |
| | | | like | |
| 42 | 1.423 | 32752_at | NADH dehydrogenase | NDUFA7 (SEQ ID NO: 40) |
| | | | (ubiquinone) 1 alpha | |
| | | | subcomplex, 7, 14.5 kDa | |
| 35 | 1.416 | 41533_at | hypothetical protein | MGC39325 (SEQ ID NO: 41) |
| | | | MGC39325 | |
| 85 | 1.412 | 38659_at | soc-2 suppressor of clear | SHOC2 (SEQ ID NO: 42) |
| | | | homolog (C. elegans) | |
| 123 | 1.41 | 36857_at | RAD1 homolog (S. pombe) | RAD1 (SEQ ID NO: 111) |
| 30 | 1.404 | 36571_at | topoisomerase (DNA) II | TOP2B (SEQ ID NO: 43) |
| | | | beta 180 kDa | |
| 17 | 1.401 | 38368_at | dUTP pyrophosphatase | DUT (SEQ ID NO: 44) |
| 94 | 1.396 | 35677_at | hypothetical protein | MGC9084 (SEQ ID NO: 112) |
| | | | MGC9084 | |
| 124 | 1.395 | 33378_at | IDN3 protein | IDN3 (SEQ ID NO: 113) |
| 93 | 1.394 | 40086_at | KIAA0261 | KIAA0261 (SEQ ID NO: 114) |
| 350 | 1.392 | 1882_g_at | | |
| 146 | 1.384 | 40610_at | zinc finger RNA binding | ZFR (SEQ ID NO: 115) |
| | | | protein | |
| 67 | 1.377 | 39091_at | cytoskeleton related | JWA (SEQ ID NO: 47) |
| | | | vitamin A responsive | |
| | | | protein | |
| 75 | 1.373 | 40045_g_at | chromosome 18 open | C18orf1 (SEQ ID NO: 48) |
| | | | reading frame 1 | |
| 54 | 1.368 | 38892_at | KIAA0240 | KIAA0240 (SEQ ID NO: 49) |
| 258 | 1.365 | 41131_f_at | heterogeneous nuclear | HNRPH2 (SEQ ID NO: 116) |
| | | | ribonucleoprotein H2 (H′) | |
| 236 | 1.364 | 41503_at | zinc fingers and | ZHX2 (SEQ ID NO: 117) |
| | | | homeoboxes 2 | |
| 47 | 1.358 | 34699_at | CD2-associated protein | CD2AP (SEQ ID NO: 50) |
| 64 | 1.337 | 32857_at | Ras association | RASSF3 (SEQ ID NO: 51) |
| | | | (RalGDS/AF-6) domain | |
| | | | family 3 | |
| 300 | 1.335 | 35991_at | LSM6 homolog, U6 small | LSM6 (SEQ ID NO: 118) |
| | | | nuclear RNA associated | |
| | | | (S. cerevisiae) | |
| 197 | 1.319 | 763_at | glia maturation factor, beta | GMFB (SEQ ID NO: 119) |
| 55 | 1.31 | 38119_at | glycophorin C (Gerbich | GYPC (SEQ ID NO: 52) |
| | | | blood group) | |
| 63 | 1.31 | 36033_at | splicing factor, | SFRS12 (SEQ ID NO: 120) |
| | | | arginine/serine-rich 12 | |
| 86 | 1.306 | 41343_at | CDP-diacylglycerol | CDS2 (SEQ ID NO: 54) |
| | | | synthase (phosphatidate | |
| | | | cytidylyltransferase) 2 | |
| 72 | 1.301 | 41573_at | Sp3 transcription factor | SP3 (SEQ ID NO: 55) |
| 102 | 1.3 | 35838_at | zinc finger protein 410 | ZNF410 (SEQ ID NO: 121) |
| 112 | 1.297 | 32539_at | COP9 constitutive | COPS8 (SEQ ID NO: 122) |
| | | | photomorphogenic | |
| | | | homolog subunit 8 | |
| | | | (Arabidopsis) | |
| 70 | 1.296 | 35739_at | myotubularin related | MTMR3 (SEQ ID NO: 56) |
| | | | protein 3 | |
| 115 | 1.292 | 39774_at | oxidase (cytochrome c) | OXA1L (SEQ ID NO: 123) |
| | | | assembly 1-like | |
| 58 | 1.287 | 41457_at | KIAA0423 | KIAA0423 (SEQ ID NO: 57) |
| 198 | 1.284 | 35019_at | zinc finger protein 539 | ZNF539 (SEQ ID NO: 124) |
| 82 | 1.283 | 32169_at | F-box only protein 21 | FBXO21 (SEQ ID NO: 58) |
| 187 | 1.282 | 36164_at | pyruvate dehydrogenase | PDHX (SEQ ID NO: 125) |
| | | | complex, component X | |
| 50 | 1.276 | 41595_at | KIAA0947 protein | KIAA0947 (SEQ ID NO: 59) |
| 78 | 1.274 | 33348_at | transcription factor 12 | TCF12 (SEQ ID NO: 60) |
| | | | (HTF4, helix-loop-helix | |
| | | | transcription factors 4) | |
| 181 | 1.274 | 37826_at | ubiquitin-conjugating | UBE2D1 (SEQ ID NO: 126) |
| | | | enzyme E2D 1 (UBC4/5 | |
| | | | homolog, yeast) | |
| 134 | 1.263 | 35255_at | importin 7 | IPO7 (SEQ ID NO: 127) |
| 363 | 1.259 | 37690_at | ilvB (bacterial acetolactate | ILVBL (SEQ ID NO: 128) |
| | | | synthase)-like | |
| 126 | 1.251 | 38654_at | heterogeneous nuclear | HNRPU (SEQ ID NO: 129) |
| | | | ribonucleoprotein U | |
| | | | (scaffold attachment factor | |
| | | | A) | |
| 74 | 1.248 | 37361_at | fibroblast growth factor | FIBP (SEQ ID NO: 61) |
| | | | (acidic) intracellular | |
| | | | binding protein | |
| 171 | 1.246 | 40515_at | eukaryotic translation | EIF2B2 (SEQ ID NO: 130) |
| | | | initiation factor 2B, subunit | |
| | | | 2 beta, 39 kDa | |
| 165 | 1.231 | 36463_at | BCL2-associated | BAG5 (SEQ ID NO: 131) |
| | | | athanogene 5 | |
| 148 | 1.229 | 31879_at | far upstream element | FUBP3 (SEQ ID NO: 132) |
| | | | (FUSE) binding protein 3 | |
| 170 | 1.221 | 41628_at | fucosyltransferase 8 | FUT8 (SEQ ID NO: 133) |
| | | | (alpha (1,6) | |
| | | | fucosyltransferase) | |
| 325 | 1.215 | 842_at | protein kinase C binding | PRKCBP1 (SEQ ID |
| | | | protein 1 | NO: 134) |
| 385 | 1.202 | 1695_at | neural precursor cell | NEDD8 (SEQ ID NO: 135) |
| | | | expressed, | |
| | | | developmentally down- | |
| | | | regulated 8 | |
| 218 | 1.2 | 33472_at | flavin containing | FMO4 (SEQ ID NO: 136) |
| | | | monooxygenase 4 | |
| 335 | 1.193 | 37725_at | protein phosphatase 1, | PPP1CC (SEQ ID NO: 137) |
| | | | catalytic subunit, gamma | |
| | | | isoform | |
| 212 | 1.186 | 37077_at | pyruvate kinase, liver and | PKLR (SEQ ID NO: 138) |
| | | | RBC | |
| 238 | 1.186 | 751_at | phosphatidylinositol | PIGC (SEQ ID NO: 139) |
| | | | glycan, class C | |
| 327 | 1.171 | 38390_at | component of oligomeric | COG2 (SEQ ID NO: 140) |
| | | | golgi complex 2 | |
| 393 | 1.169 | 33883_at | embryonal Fyn-associated | EFS (SEQ ID NO: 141) |
| | | | substrate | |
| 433 | 0.864 | 39157_at | immunoglobulin lambda | IGLVIVOR22-2 |
| | | | variable (IV)/OR22-2 | |
| 331 | 0.851 | 35850_at | phosphatidylserine | PTDSR (SEQ ID NO: 142) |
| | | | receptor | |
| 333 | 0.848 | 33169_at | neogenin homolog 1 | NEO1 (SEQ ID NO: 143) |
| | | | (chicken) | |
| 318 | 0.847 | 32660_at | KIAA0342 gene product | KIAA0342 (SEQ ID NO: 144) |
| 250 | 0.845 | 189_s_at | plasminogen activator, | PLAUR (SEQ ID NO: 145) |
| | | | urokinase receptor | |
| 312 | 0.845 | 33441_at | T-cell leukemia | TCTA (SEQ ID NO: 146) |
| | | | translocation altered gene | |
| 347 | 0.844 | 1277_at | Rho guanine exchange | ARHGEF16 (SEQ ID |
| | | | factor (GEF) 16 | NO: 147) |
| 223 | 0.84 | 39432_at | UDP-Gal: betaGlcNAc beta | B4GALT4 (SEQ ID NO: 148) |
| | | | 1,4-galactosyltransferase, | |
| | | | polypeptide 4 | |
| 421 | 0.837 | 36218_g_at | serine/threonine kinase 38 | STK38 (SEQ ID NO: 149) |
| 286 | 0.831 | 1014_at | polymerase (DNA | POLG (SEQ ID NO: 150) |
| | | | directed), gamma | |
| 285 | 0.812 | 38832_r_at | guanine nucleotide | GNB2 (SEQ ID NO: 151) |
| | | | binding protein (G | |
| | | | protein), beta polypeptide 2 | |
| 329 | 0.809 | 41162_at | protein phosphatase 1G | PPM1G (SEQ ID NO: 152) |
| | | | (formerly 2C), | |
| | | | magnesium-dependent, | |
| | | | gamma isoform | |
| 334 | 0.808 | 40329_at | solute carrier family 39 | SLC39A7 (SEQ ID NO: 153) |
| | | | (zinc transporter), member 7 | |
| 169 | 0.805 | 40083_at | senataxin | KIAA0625 (SEQ ID NO: 154) |
| 175 | 0.795 | 40127_at | paired related homeobox 1 | PRRX1 (SEQ ID NO: 155) |
| 114 | 0.781 | 35630_at | lethal giant larvae | LLGL2 (SEQ ID NO: 156) |
| | | | homolog 2 (Drosophila) | |
| 62 | 0.767 | 882_at | colony stimulating factor 1 | CSF1 (SEQ ID NO: 62) |
| | | | (macrophage) | |
| 130 | 0.766 | 31953_f_at | G antigen 3 | GAGE3 (SEQ ID NO: 157) |
| 60 | 0.754 | 35309_at | suppression of | ST14 (SEQ ID NO: 63) |
| | | | tumorigenicity 14 (colon | |
| | | | carcinoma, matriptase, | |
| | | | epithin) | |
| 22 | 0.751 | 33863_at | hypoxia up-regulated 1 | HYOU1 (SEQ ID NO: 64) |
| 39 | 0.737 | 32566_at | chondroitin polymerizing | CHPF (SEQ ID NO: 66) |
| | | | factor | |
| 219 | 0.733 | 41742_s_at | optineurin | OPTN (SEQ ID NO: 158) |
| 192 | 0.73 | 36963_at | phosphogluconate | PGD (SEQ ID NO: 159) |
| | | | dehydrogenase | |
| 53 | 0.711 | 40237_at | pleckstrin homology-like | PHLDA2 (SEQ ID NO: 67) |
| | | | domain, family A, member 2 | |
| 98 | 0.704 | 1933_g_at | ATP-binding cassette, | ABCC5 (SEQ ID NO: 68) |
| | | | sub-family C | |
| | | | (CFTR/MRP), member 5 | |
| 104 | 0.701 | 41231_f_at | high-mobility group | HMGN2 (SEQ ID NO: 160 |
| | | | nucleosomal binding | |
| | | | domain 2 | |
| 37 | 0.699 | 33212_at | ribosome binding protein 1 | RRBP1 (SEQ ID NO: 69) |
| | | | homolog 180 kDa (dog) | |
| 77 | 0.698 | 1644_at | eukaryotic translation | EIF3S2 (SEQ ID NO: 70) |
| | | | initiation factor 3, subunit | |
| | | | 2 beta, 36 kDa | |
| 27 | 0.681 | 33667_at | peptidylprolyl isomerase A | PPIA (SEQ ID NO: 71) |
| | | | (cyclophilin A) | |
| 251 | 0.678 | 37585_at | small nuclear | SNRPA1 (SEQ ID NO: 161 |
| | | | ribonucleoprotein | |
| | | | polypeptide A′ | |
| 18 | 0.672 | 38760_f_at | butyrophilin, subfamily 3, | BTN3A2 (SEQ ID NO: 72) |
| | | | member A2 | |
| 178 | 0.652 | 34264_at | RUN and SH3 domain | RUSC1 (SEQ ID NO: 162 |
| | | | containing 1 | |
| 150 | 0.652 | 32275_at | secretory leukocyte | SLPI (SEQ ID NO: 163 |
| | | | protease inhibitor | |
| | | | (antileukoproteinase) | |
| 69 | 0.651 | 40116_at | phosphofructokinase, liver | PFKL (SEQ ID NO: 74) |
| 33 | 0.615 | 32116_at | epidermodysplasia | EVER1 (SEQ ID NO: 76) |
| | | | verruciformis 1 | |
| 49 | 0.614 | 32332_at | isocitrate dehydrogenase | IDH2 (SEQ ID NO: 77) |
| | | | 2 (NADP+), mitochondrial | |
| 180 | 0.611 | 38790_at | epoxide hydrolase 1, | EPHX1 (SEQ ID NO: 164 |
| | | | microsomal (xenobiotic) | |
| 301 | 0.596 | 34703_f_at | | |
| 9 | 0.589 | 41220_at | MLL septin-like fusion | MSF (SEQ ID NO: 78) |
| 434 | 0.589 | 1180_g_at | | |
| 8 | 0.57 | 40290_f_at | sialyltransferase 4A (beta- | SIAT4A (SEQ ID NO: 79) |
| | | | galactoside alpha-2,3- | |
| | | | sialyltransferase) | |
| 5 | 0.569 | 32378_at | pyruvate kinase, muscle | PKM2 (SEQ ID NO: 80) |
| 6 | 0.562 | 36614_at | heat shock 70 kDa protein | HSPA5 (SEQ ID NO: 81) |
| | | | 5 (glucose-regulated | |
| | | | protein, 78 kDa) | |
| 34 | 0.54 | 34885_at | synaptogyrin 2 | SYNGR2 (SEQ ID NO: 82) |
| 90 | 0.535 | 37920_at | paired-like homeodomain | PITX1 (SEQ ID NO: 83) |
| | | | transcription factor 1 | |
| 44 | 0.501 | 31960_f_at | G antigen 2 | GAGE2 (SEQ ID NO: 84) |
| 168 | 0.491 | 691_g_at | procollagen-proline, 2- | P4HB (SEQ ID NO: 165 |
| | | | oxoglutarate 4- | |
| | | | dioxygenase (proline 4- | |
| | | | hydroxylase), beta | |
| | | | polypeptide (protein | |
| | | | disulfide isomerase; | |
| | | | thyroid hormone binding | |
| | | | protein p55) | |
| 20 | 0.487 | 39708_at | signal transducer and | STAT3 (SEQ ID NO: 87) |
| | | | activator of transcription 3 | |
| | | | (acute-phase response | |
| | | | factor) | |
| 73 | 0.471 | 32174_at | solute carrier family 9 | SLC9A3R1 (also referred to |
| | | | (sodium/hydrogen | as EBP50; SEQ ID NO: 88) |
| | | | exchanger), isoform 3 | |
| | | | regulator 1 | |
| 1 | 0.45 | 41045_at | secreted and | SECTM1 (SEQ ID NO: 89) |
| | | | transmembrane 1 | |
| 80 | 0.395 | 36454_at | carbonic anhydrase XII | CA12 (SEQ ID NO: 90) |
| 153 | 0.337 | 608_at | apolipoprotein E | APOE (SEQ ID NO: 166 |
| 11 | 0.294 | 35174_i_at | eukaryotic translation | EEF1A2 (SEQ ID NO: 91) |
| | | | elongation factor 1 alpha 2 | |
| 38 | 0.281 | 1737_s_at | insulin-like growth factor | IGFBP4 (SEQ ID NO: 92) |
| | | | binding protein 4 | |
| 13 | 0.195 | 36681_at | apolipoprotein D | APOD (SEQ ID NO: 93) |

[0108] In specific embodiments, there may be one or more expressed genes identified in Table 1 and/or Table 2 as associated with tamoxifen resistance and therefore is useful for predicting therapy for an individual. In additional embodiments, there may be combinations of expressed genes identified in Table 1 and/or Table 2 as being indicative of tamoxifen resistance and therefore predictive for therapy for an individual. There may be combinations of two expressed genes, three expressed genes, four expressed genes, or five or more expressed genes, for example. In specific embodiments, the profile comprises at least a phosphatase, such as, for example, DUSP6. In other embodiments, the profile additionally or alternative comprises EBP50 and/or RhoGDIa.

[0109] A skilled artisan recognizes that the relevance of the expressed genes indicative of tamoxifen resistance may be confirmed by routine methods in the art. For example, demonstration that overexpression of a particular gene confers resistance to tamoxifen in ER-positive breast cancer cells may employ genetic engineering, and then investigation of their growth in xenograft models of human breast cancer. Furthermore, inhibitors of the appropriate signaling pathways and/or siRNA knock-down studies to reduce the levels of potential ER accessory proteins or signaling molecules may be utilized. The development of small molecule inhibitors to resistance genes are ideal targets for drug development using rational drug design, in vitro chemical library screening on either a small or large scale, and high-content target-based cellular assays.

[0110] In specific embodiments, an expressed tamoxifen-resistant and/or tamoxifen-sensitive gene is assessed in an in vivo model system. For example, vectors comprising the expressed gene in question may be delivered to a xenograft breast cancer mouse model. Following this, the mouse are administered estrogen for a period of time, after which either tamoxifin or a control estrogen is delivered. If the gene is related to tamoxifen resistance, then the tumor size of transformed mice should increase. In vitro methods may also be employed to confirm association of a particular gene with tamoxifen resistance. For example, soft agar experiments well known in the art are useful for assessing colony number in the presence of the gene in question as a function of resistance to tamoxifen.

[0111] IV. Collection of Samples

[0112] In aspects of the invention, samples are obtained from an individual for subjecting to the methods, such as from an individual suspected of developing resistance to a chemotherapy. Any suitable methods for obtaining the samples are within the scope of the invention, and exemplary methods include by fine needle aspirates obtained via a biopsy procedure. Samples may be collected commensurate with the cancer for which the chemotherapy is directed, such as via a PAP smear, ductal lavage, fine needle aspiration, prostate massage, sputum (including saliva, bronchial brush or bronchial wash), stool, semen, urine, or other bodily fluid (including ascitic fluid, cerebral spinal fluid (CSF), bladder wash, and pleural fluid). Non-limiting examples of tissues susceptible to fine needle aspiration include lymph node, lung, thyroid, breast, and liver.

[0113] One or more cells of the samples may be isolated and used to prepare the RNA from said cell(s). In specific embodiments of the invention, the isolation of one or more cells may be performed by microdissection, such as, but not limited to, laser capture microdissection (LCM) or laser microdissection (LMD). The levels and/or activities of the RNA(s) may be assayed directly or indirectly, or may be amplified in whole or in part prior to detection.

[0114] V. Identification of Tumors

[0115] In specific embodiments of the invention, resistance to chemotherapy is determined in tumors that arise during the chemotherapy treatment by evaluating an RNA expression profile of expressed RNAs in the tumor(s). One aspect of this embodiment encompasses identifying the presence of tumors in the individual. This may be done by any suitable means in the art, including palpitation, sonogram, X-ray, biopsy, and so forth. In specific embodiments, the tumors are metastatic tumors. Following identification of the presence of one or more of the tumors, expressed RNA is isolated from one or more cells of the one or more tumors, and levels are determined, such as the levels of polynucleotides listed in Table 1, Table 2, or both.

[0116] VI. Estrogen Receptors and Prediction of Response to Therapy

[0117] It has been estimated that between 60-75% of women with invasive breast cancer express ER α and β forms (Harvey 1999; Fuqua, Schiff et al. 2003). ER α expression is an important prognostic factor predicting the natural history of breast cancer after surgery in the absence of treatment (Knight, Livingston et al. 1977; Clark and McGuire 1988). The prognostic value of ER α in breast cancer has not yet been firmly established, although the majority of studies suggest that like ER α, ERβ protein expression is also associated with a better outcome in untreated patients (Omoto, Kobayashi et al. 2002). It is well-established though that ER α levels predict a better response to Tam, and that response is directly related to the amount of receptor present in a tumor (Early_Breast_Cancer_Trialists'_Collaborative_Group 1998). Although it was initially hypothesized that ERβ expression might predict HR (Paech, Webb et al. 1997), it appears that high ERβ protein expression is actually associated with a better response to Tam in the majority of studies published to date (Mann, Laucirica et al. 2001; Iwase, Zhang et al. 2003)(Hopp, in press).

[0118] An important question is whether ER loss is a significant mechanism of acquired HR? Although ER α is reduced in Tam-resistant tumors overall, the development of HR is more frequently associated with the maintenance of ER α at the time of progression (Encamacion, Ciocca et al. 1993; Nedergaard, Haerslev et al. 1995; Kuukasjarvi, Kononen et al. 1996). Further support for the continued role of ER in HR comes from the use of other endocrine therapies with distinct mechanisms of action, such as the steroidal antagonist faslodex that exhibits no ER α agonist activity, in Tam-resistant (TR) patients. About two-thirds of TR breast cancer patients respond to second-line therapy with faslodex (Howell, DeFriend et al. 1996). Similarly, the third-generation aromatase inhibitors anastrazole and letrozole are most effective in post-menopausal TR patients (Buzdar, Douma et al. 2001). Thus, resistance to Tam does not result in global HR.

[0119] VII. Mechanisms of resistance to hormonal therapies

[0120] A. Proliferation

[0121] Undoubtedly, estrogen is important for the growth of many breast cancers. One explanation for the acquisition of HR could be the deregulated expression of cell cycle components which release the cell cycle and thus tumor proliferation from normal estrogen control. In fact, many of the estrogen-regulated genes identified in estrogen-responsive breast cancer cells are genes related to cell cycle regulation, such as cyclin A1, cyclin D1, a key regulator of the G1/S phase transition of the cell cycle, and the E2F1 transcription factor (Soulez and Parker 2001; Coser, Chesnes et al 2003; Hayashi, Eguchi et al. 2003). Tam also functions as an agonist to induce the expression of genes involved in promoting cell cycle progression, including fos, myc, cyclin A2, and E2F1 (Hodges, Cook et al. 2003). Interestingly, cyclin D1 is not directly induced by Tam treatment.

[0122] Cyclin D1 is a regulatory subunit for two cyclin-dependent kinases, cdk4 and cdk6. High levels of cyclin D1 in tumors may produce sufficient cdk4 activity that G1 progression occurs independently of normal controls, and it may titrate out Cip/kip inhibitors, making a cell insensitive to their negative regulation (Zhou, Hopp et al. 2001). Cyclin D1 can also stimulate ERα activity in the absence of estrogen (Neuman, Ladha et al. 1997; Zwijsen, Wientjens et al. 1997). Furthermore, cyclin D1 can form a complex with ERα and receptor coactivators (McMahon, Suthiphongchai et al. 1999; Lamb, Ladha et al. 2000), but there are conflicting results whether cyclin D1 overexpression affects Tam response in vitro. However, a recent retrospective study in patients with long-term clinical followup demonstrated that high cyclin D1 levels were associated with a worse overall survival in patients treated with Tam (Stendahl, Kronblad et al. 2004). Thus, although it remains to be validated, high cyclin D1 might be an independent predictor of HR.

[0123] B. Apoptosis

[0124] Tissue homeostasis is a fine balance between proliferation, apoptosis, and cellular differentiation. Apoptosis plays a key role in the growth regulation of normal and cancerous tissues, and its dysregulation can lead to cancer. We know that the withdrawal of hormones and/or growth factors can induce apoptosis in breast tissues, but there are relatively few studies that have examined the role of apoptosis following hormonal treatment of breast cancer. Tam induces apoptotic death in ERα-positive breast cancer cells, but there are number of apoptotic mechanisms which are believed to be non-ERα mediated (Mandlekar and Kong 2001). Estrogen treatment does increase the levels of the antiapoptotic proteins, bcl-2 and bclxL (Gompel, Somai et al. 2000), and ERα expression in breast tumors is strongly associated with bcl-2 levels (Simon 1993). The effects of Tam on apoptosis can also be reversed by the addition of estrogen (Gompel, Somai et al. 2000), suggesting that its effects could be mediated, in part, through apoptotic mechanisms. It has also been reported that overexpression of the HER2 growth factor receptor up-regulates the expression of bcl-2 and bcl-x1 in ERα-positive breast cancer cells, and suggest that bcl-2 may be associated with the relative TR of these engineered cell lines (Kumar, Mandal et al. 1996). However retrospective studies correlating increased bcl-2 levels with TR in clinical breast cancers are equivocal (Daidone, Luisi et al. 1999), demonstrating the need for more studies powered to address the question whether enhanced bcl-2 expression is present in HR tumors.

[0125] C. ER Mutations

[0126] A number of years ago, presented an attractive hypothesis that mutations in ERα itself might be found if ERα was acting as an “oncogene” during breast tumorigenesis (Fuqua 1994). However, unlike most oncogenes, it has been estimated that only 1% of primary tumors (Roodi, Bailey et al. 1995) exhibit missense mutations in the receptor. Karnik et al. (Karnik, Kulkami et al. 1994) reported that 1 of 5 metastatic breast tumors contained an ERα mutation, and found mutations in 3 of 30 metastatic lesions (Zhang, Borg et al. 1997), however the clinical evidence of these ERα mutations in metastatic tumors playing a role in HR is lacking, but it probably warrants further study given the small number of metastatic lesions that have been examined. In addition, these earlier studies were all performed on unselected, heterogenous tumor material before the introduction of laser-capture microdissection techniques.

[0127] The present inventors have utilized microdissection and manual genomic sequence analysis of DNA from premalignant breast lesions, and discovered an A to G transition at nucleotide 908 of ERα in approximately 30% of the lesions (Fuqua, Wiltschke et al. 2000 and U.S. Pat. No. 6,821,732). The mutation results in a substitution of lysine 303 for arginine (K303R ERα, and it increases the estrogen sensitivity and transcriptional activity of the receptor in breast cancer cells. The mutation also alters ERα binding to coactivators. The results indicate that the mutation is present in invasive breast tumors in US women (Fuqua 2002), but the mutation has not been detected in breast tumors from Japanese women (Zhang, Yamashita et al. 2003). It is tempting to speculate that this disparity could be related to the recognized lower incidence of ductal hyperplasia and tumor ERα-positivity in Japanese women (Stemmermann 1991), or other ethnic differences in etiology and incidence between the two countries (Maskarinec 2000; Deapen, Liu et al. 2002). However, the clinical significance, and any potential role that the K303R ERα mutation may have in HR is currently unknown.

[0128] D. Growth Factor Crosstalk

[0129] The role of growth factor crosstalk in HR is highlighted in data showing the impact of overexpression of components of the peptide growth factor signaling network (epidermal growth factor receptor (EGFR) and HER2) on the development of TR. It was first demonstrated that HER2 overexpression in ER+ MCF-7 human breast cancer xenografts renders them resistant to Tam (Benz, Scott et al. 1993), a finding substantiated by other groups who find markedly increased levels of EGFR and HER2 in Tam-resistant MCF-7 cells (Hutcheson, Knowlden et al. 2003; Nicholson, Gee et al. 2003). TR in breast cancer cells can also be reversed with EGFR/HER2 tyrosine kinase inhibitors, and combined treatment with Tam is even more effective (Kurokawa, Lenferink et al. 2000; Moulders, Yakes et al. 2001; Massarweh, Shou et al. 2002). The inventors have recently provided clinical evidence for the significance of this crosstalk in a prospective study showing a poorer disease-free survival for those patients receiving adjuvant tamoxifen whose tumors expressed high levels of both HER2 and the ER coregulatory protein AIB 1 (Osborne, Bardou et al. 2003). Thus, it can be concluded that growth factor receptor overexpression and continued ER expression are important for the development of TR, at least in the small portion of ER+ patients who co-express HER2 or EGFR.

[0130] The molecular basis for growth factor receptor-associated TR could involve enhanced downstream signal transduction, and current models advocate that growth factor stimulation of ER activity is likely to be mediated through phosphorylation of the ER. For instance, Mitogen Activated Protein Kinases (MAPK) ERK-1 and 2, which are downstream of growth factor signaling, have been shown to be biomarkers for a shorter duration of response to Tam in one small clinical study (Gee, Robertson et al. 2001). However; when MEK1, an upstream activator of MAPK, is overexpressed in MCF-7 cells, these cells remain sensitive to Tam (Atanaskova, Keshamouni et al. 2002). On the other hand, inhibition of MAPK activity can reverse TR in a HER2-overexpressing MCF-7 model system (Kurokawa, Lenferink et al. 2000). Thus, although it is apparent that MAPK activation can contribute to estrogen-induced proliferation (Castoria, Barone et al. 1999), estrogen sensitivity (Santen, Song et al. 2002), and cell survival (Razandi, Pedram et al. 2000), do not yet have a consensus on the molecular mechanisms which coordinate with MAPK activation and are required or involved in TR.

[0131] E. Signal Transduction

[0132] We know that ERα serine residue 118 (S118) appears to be an important site that can be phosphorylated by activated MAPK, resulting in ligand-independent ER activity (Kato, Endoh et al. 1995), and also that MAPK through its downstream effector RSK can phosphorylate ERα S167 (Joel, Smith et al. 1998a). But estrogen can lead to phosphorylation of S118 by a mechanism that does not involve MAPK in some breast cancer cells (Joel, Traish et al. 1998), and S118 can also be phosphorylated by other kinases (Chen, Riedl et al. 2000), so that the exact consequences of ER activation at this phosphorylation site is yet to be defined. Furthermore, one must keep in mind that not only does phosphorylation by MAPK activate ER, but estrogen reciprocally also influences activation of MAPK [reviewed in (Driggers and Segars 2002)], suggesting the existence of feedback loops between the two signaling systems. Thus the importance of ER phosphorylation may be dependent not only on MAPK, but also on other signaling molecules that impact on MAPK, which is the subject of Aim 1 of this proposal.

[0133] ER can also be phosphorylated and activated by a number of other pathways, including the PI3K/AKT pathway (Martin, Franke et al. 2000), a mechanism that has been implicated in TR (Campbell, Bhat-Nakshatri et al. 2001), as well as Protein Kinase A signaling which can increase the estradiol-like activity of Tam (Fujimoto and Katzenellenbogen 1994), and Protein Kinase C (Cho and Katzenellenbogen 1993). Interestingly, there are also multiple feedback systems between ER and these other intracellular signaling kinases, suggesting that these feedback loops may be integrated, a concept which could help explain the heterogeneity, cell type, and tissue specific nature of ER's responses. The role of growth factors and phosphorylation in estrogen signaling is obviously a much studied area, and represents a scientific endeavor that is now bearing fruit with the recent introduction of numerous signal transduction inhibitors into clinical practice (Johnston, Head et al. 2003).

[0134] F. Membrane Initiated Steroid Signaling

[0135] In addition to the classical effects of ERα acting as a transcription factor, it has been demonstrated that estrogen can exert early membrane signaling events that do not require classical genomic transcription, although these effects, termed membrane initiated steroid signaling, or MISS can overlap with and potentially synergize with classical transcriptional mechanisms, thus complicating the dissection of MISS in ultimate hormone action. There is growing supportive evidence for the existence of a plasma membrane receptor localized mainly in caveolae (Pappas, Gametchu et al. 1995; Chambliss, Yuhanna et al. 2000; Razandi, Pedram et al. 2000; Razandi, Pedram et al. 2003). Membrane-bound ERα has been shown to stimulate the release of heparin-binding epidermal growth factor which subsequently activates the EGFR (Prenzel, Zwick et al. 2000). Thus, MISS can activate proliferation through the EGFR/ras/MAPK signaling cascade, and conversely inhibit apoptosis via negative regulation of JNK-dependent mechanisms, possibly through bcl-2 (Razandi, Pedram et al. 2000). There are reports that the membrane form of ERα represents a 46 kDa variant form of the receptor (Li, Haynes et al. 2003), however, clinical evidence for a role of this form in breast cancer is currently lacking. MISS can also activate other signaling cascades, such as the IGF-1 pathway, P13 kinase, and G protein coupled receptors (Razandi, Pedram et al. 1999) (Kahlert, Nuedling et al. 2000) (Song, Santen et al. 2002). How MISS balances with the nuclear functions of ERα, and its role if any, in HR are an open area of research. However, an understanding of the molecular mechanisms associated with MISS may introduce new possibilities for targeted therapies to augment current hormonal therapies.

[0136] G. Progesterone Receptors (PRs) A AND B

[0137] The two PR isoforms, PR-A and PR-B, possess different in vitro and in vivo activities, suggesting that in tumors the ratio of their expression may control hormone responsiveness. In general, PR-B are strong transcriptional activators while PR-A can act as dominant repressors of PR-B and ER. Thus their balance may affect tamoxifen response in breast cancers. Expression of the two isoforms correlated with each other, as well as with ER. Further analyses revealed that patients with PR-positive tumors but high PR-A/PR-B ratio, which were often caused by high PR-A levels, were 2.76 times more likely to relapse than patients with lower ratios, indicating resistance to tamoxifen. In breast cancers, total PR (as measured by ligand binding assay) has many of the same prognostic and predictive implications as ER (Ravdin, Green et al. 1992; Fisher, Perera et al. 1998). Approximately half of primary breast tumors are positive for both PR and ER, whereas less than 5% are negative for ER but still positive for PR. In addition, well-differentiated tumors are more likely to be PR-positive than are poorly differentiated tumors. Several clinical studies have confirmed that elevated total PR levels correlate with an increased probability of response to tamoxifen, longer time to treatment failure, and longer overall survival (Clark, McGuire et al. 1983; Gelbfish, Davidson et al. 1988; Stonelake, Baker et al. 1994).

[0138] Furthermore, study also indicates that the high PR-A/PR-B ratios, at least in this study population, were frequently caused by excess PR-A, rather than low PR-B. Predominance of PR-A could cause tamoxifen resistance by directly repressing the transcriptional activity of ER as suggested by several in vitro studies (Vegeto, Shahbaz et al. 1993; McDonnell, Shahbaz et al. 1994; Wen, Xu et al. 1994; Kraus, Weis et al. 1995), or indirectly by PR-A directed up-regulation of genes known to be involved in tumor aggressiveness or prognosis. These data support other work indicating that PR-A rich tumors have heightened aggressiveness, and that abnormal PR-A excess is found in the healthy breasts of women with BRCA1/2 mutations (Mote, Leary et al. 2004).

[0139] Second, are the recent provocative results from the ATAC study showing only a modest advantage for anastrazole compared to tamoxifen in the ER+/PR+ group, while there was a major benefit for anastrazole in the ER+/PR− subgroup (The_ATAC_Trialists'_Group 2002; Dowsett 2003). Although this study is undoubtedly preliminary and awaits confirmation, it did involve thousands of patients, and supports the data from Bardou and colleagues (Bardou, Arpino et al. 2003). Finally, in view of recent trials showing a significant advantage for the sequence of tamoxifen followed by an aromatase inhibitor, it is an intriguing possibility that PR status could be used to select initial therapy. ER and PR-positive tumors might best be treated by tamoxifen followed by an aromatase inhibitor, while ER+/PR— tumors might receive initial treatment with an aromatase inhibitor because of their relative resistance to tamoxifen. This hypothesis should be tested in ongoing clinical trials.

[0140] VIII. Additional Breast Cancer Therapies

[0141] In an embodiment of the invention, a chemotherapy-resistant tumor, such as a tamoxifen-resistant tumor, is predicted/diagnosed in individuals with breast cancer using methods described herein. For those individuals wherein tamoxifen resistance occurs and is no longer effective, it is desirable to employ an additional/alternative regimen for treatment of their breast cancer. This regimen may utilize chemotherapy, radiation, surgery, immunotherapy, hormone therapy, gene therapy, and so forth, and combinations thereof.

[0142] A. Chemotherapy

[0143] Examples of chemotherapeutic agents that may be employed upon development of resistance to tamoxifen include Letrozole, cyclophosphamide, pamidronate, doxyrubicin, doxyrubicin/adriamycin, capecitabine and/or docetaxel, 5′ fluorouracil, arimidex, fulvestrant, cyclophosphamide, raloxifene, gefitinib, trastuzumab, petuzumab, herceptin, and/or paclitaxel. In addition to these exemplary chemotherapeutic agents, any analog or derivative variant thereof are within the scope of the invention.

[0144] B. Radiotherapy

[0145] Radation-based therapies are useful in conjunction with tumors resistant to therapy. That is, other factors that cause DNA damage and have been used extensively include what are commonly known as γ-rays, X-rays, and/or the directed delivery of radioisotopes to tumor cells. Other forms of DNA damaging factors are also contemplated such as microwaves and UV-irradiation. It is most likely that all of these factors effect a broad range of damage on DNA, on the precursors of DNA, on the replication and repair of DNA, and on the assembly and maintenance of chromosomes. Dosage ranges for X-rays range from daily doses of 50 to 200 roentgens for prolonged periods of time (3 to 4 wk), to single doses of 2000 to 6000 roentgens. Dosage ranges for radioisotopes vary widely, and depend on the half-life of the isotope, the strength and type of radiation emitted, and the uptake by the neoplastic cells.

[0146] The terms “contacted” and “exposed,” when applied to a cell, are used herein to describe the process by which a therapeutic construct and a chemotherapeutic or radiotherapeutic agent are delivered to a target cell or are placed in direct juxtaposition with the target cell. To achieve cell killing or stasis, both agents are delivered to a cell in a combined amount effective to kill the cell or prevent it from dividing.

[0147] C. Immunotherapy

[0148] Immunotherapeutics, generally, rely on the use of immune effector cells and molecules to target and destroy cancer cells. The immune effector may be, for example, an antibody specific for some marker on the surface of a tumor cell. The antibody alone may serve as an effector of therapy or it may recruit other cells to actually effect cell killing. The antibody also may be conjugated to a drug or toxin (chemotherapeutic, radionuclide, ricin A chain, cholera toxin, pertussis toxin, etc.) and serve merely as a targeting agent. Alternatively, the effector may be a lymphocyte carrying a surface molecule that interacts, either directly or indirectly, with a tumor cell target. Various effector cells include cytotoxic T cells and NK cells.

[0149] Generally, the tumor cell may bear some marker that is amenable to targeting, i.e., is not present on the majority of other cells. Many tumor markers exist and any of these may be suitable for targeting in the context of the present invention. Common tumor markers include carcinoembryonic antigen, prostate specific antigen, urinary tumor associated antigen, fetal antigen, tyrosinase (p97), gp68, TAG-72, HMFG, Sialyl Lewis Antigen, MucA, MucB, PLAP, estrogen receptor, laminin receptor, erb B and p155.

[0150] D. Genes

[0151] In yet another embodiment, the secondary treatment is a gene therapy in which a therapeutic polynucleotide is administered to those individuals have tamoxifen-resistant tumors. Delivery of a vector comprising a polynucleotide encoding a cancer-treating activity will have an anti-hyperproliferative effect on target tissues. A variety of proteins are encompassed within the invention, exemplary embodiments of which are described below.

[0152] 1. Inducers of Cellular Proliferation

[0153] The proteins that induce cellular proliferation further fall into various categories dependent on function. The commonality of all of these proteins is their ability to regulate cellular proliferation. For example, a form of PDGF, the sis oncogene, is a secreted growth factor. Oncogenes rarely arise from genes encoding growth factors, and at the present, sis is the only known naturally-occurring oncogenic growth factor. In one embodiment of the present invention, it is contemplated that anti-sense mRNA directed to a particular inducer of cellular proliferation is used to prevent expression of the inducer of cellular proliferation.

[0154] The proteins FMS, ErbA, ErbB and neu are growth factor receptors. Mutations to these receptors result in loss of regulatable function. For example, a point mutation affecting the transmembrane domain of the Neu receptor protein results in the neu oncogene. The erbA oncogene is derived from the intracellular receptor for thyroid hormone. The modified oncogenic ErbA receptor is believed to compete with the endogenous thyroid hormone receptor, causing uncontrolled growth.

[0155] The largest class of oncogenes includes the signal transducing proteins (e.g., Src, Abl and Ras). The protein Src is a cytoplasmic protein-tyrosine kinase, and its transformation from proto-oncogene to oncogene in some cases, results via mutations at tyrosine residue 527. In contrast, transformation of GTPase protein ras from proto-oncogene to oncogene, in one example, results from a valine to glycine mutation at amino acid 12 in the sequence, reducing ras GTPase activity.

[0156] The proteins Jun, Fos and Myc are proteins that directly exert their effects on nuclear functions as transcription factors.

[0157] 2. Inhibitors of Cellular Proliferation

[0158] The tumor suppressor oncogenes function to inhibit excessive cellular proliferation. The inactivation of these genes destroys their inhibitory activity, resulting in unregulated proliferation. The tumor suppressors p53, p16 and C-CAM are described below.

[0159] High levels of mutant p53 have been found in many cells transformed by chemical carcinogenesis, ultraviolet radiation, and several viruses. The p53 gene is a frequent target of mutational inactivation in a wide variety of human tumors and is already documented to be the most frequently mutated gene in common human cancers. It is mutated in over 50% of human NSCLC (Hollstein et al., 1991) and in a wide spectrum of other tumors.

[0160] The p53 gene encodes a 393-amino acid phosphoprotein that can form complexes with host proteins such as large-T antigen and E1B. The protein is found in normal tissues and cells, but at concentrations which are minute by comparison with transformed cells or tumor tissue.

[0161] Wild-type p53 is recognized as an important growth regulator in many cell types. Missense mutations are common for the p53 gene and are essential for the transforming ability of the oncogene. A single genetic change prompted by point mutations can create carcinogenic p53. Unlike other oncogenes, however, p53 point mutations are known to occur in at least 30 distinct codons, often creating dominant alleles that produce shifts in cell phenotype without a reduction to homozygosity. Additionally, many of these dominant negative alleles appear to be tolerated in the organism and passed on in the germ line. Various mutant alleles appear to range from minimally dysfunctional to strongly penetrant, dominant negative alleles (Weinberg, 1991).

[0162] Another inhibitor of cellular proliferation is p16. The major transitions of the eukaryotic cell cycle are triggered by cyclin-dependent kinases, or CDK's. One CDK, cyclin-dependent kinase 4 (CDK4), regulates progression through the G1. The activity of this enzyme may be to phosphorylate Rb at late G1. The activity of CDK4 is controlled by an activating subunit, D-type cyclin, and by an inhibitory subunit, the p161NK4 has been biochemically characterized as a protein that specifically binds to and inhibits CDK4, and thus may regulate Rb phosphorylation (Serrano et al., 1993; Serrano et al., 1995). Since the p161NK4 protein is a CDK4 inhibitor (Serrano, 1993), deletion of this gene may increase the activity of CDK4, resulting in hyperphosphorylation of the Rb protein. p16 also is known to regulate the function of CDK6.

[0163] p161NK4 belongs to a newly described class of CDK-inhibitory proteins that also includes p16B, p19, p21Waf1/Cip1, and p27KIP1. The p161NK4 gene maps to a chromosome region frequently deleted in many tumor types. Homozygous deletions and mutations of the p161NK4 gene are frequent in human tumor cell lines. This evidence suggests that the p161NK4 gene is a tumor suppressor gene. This interpretation has been challenged, however, by the observation that the frequency of the p161NK4 gene alterations is much lower in primary uncultured tumors than in cultured cell lines (Caldas et al., 1994; Cheng et al., 1994; Hussussian et al., 1994; Kamb et al., 1994; Kamb et al., 1994; Mori et al., 1994; Okamoto et al., 1994; Nobori et al., 1995; Orlow et al., 1994; Arap et al., 1995). Restoration of wild-type p161NK4 function by transfection with a plasmid expression vector reduced colony formation by some human cancer cell lines (Okamoto, 1994; Arap, 1995).

[0164] Other genes that may be employed according to the present invention include Rb, APC, DCC, NF-1, NF-2, WT-1, MEN-I, MEN-II, zac1, p73, VHL, MMAC1/PTEN, DBCCR-1, FCC, rsk-3, p27, p27/p16 fusions, Bik/p27 fusions, anti-thrombotic genes (e.g., COX-1, TFPI), PGS, Dp, E2F, ras, myc, neu, raf, erb, fins, trk, ret, gsp, hst, abl, E1A, p300, genes involved in angiogenesis (e.g., VEGF, FGF, thrombospondin, BAI-1, GDAIF, or their receptors) and MCC.

[0165] 3. Regulators of Programmed Cell Death

[0166] Apoptosis, or programmed cell death, is an essential process for normal embryonic development, maintaining homeostasis in adult tissues, and suppressing carcinogenesis (Kerr et al., 1972). The Bcl-2 family of proteins and ICE-like proteases have been demonstrated to be important regulators and effectors of apoptosis in other systems. The Bcl 2 protein, discovered in association with follicular lymphoma, plays a prominent role in controlling apoptosis and enhancing cell survival in response to diverse apoptotic stimuli (Bakhshi et al., 1985; Cleary and Sklar, 1985; Cleary et al., 1986; Tsujimoto et al., 1985; Tsujimoto and Croce, 1986). The evolutionarily conserved Bcl 2 protein now is recognized to be a member of a family of related proteins, which can be categorized as death agonists or death antagonists.

[0167] Subsequent to its discovery, it was shown that Bcl 2 acts to suppress cell death triggered by a variety of stimuli. Also, it now is apparent that there is a family of Bcl 2 cell death regulatory proteins which share in common structural and sequence homologies. These different family members have been shown to either possess similar functions to Bcl 2 (e.g., BclXL, BclW, BclS, Mcl-1, A1, Bfl-1) or counteract Bcl 2 function and promote cell death (e.g., Bax, Bak, Bik, Bim, Bid, Bad, Harakiri).

[0168] E. Surgery

[0169] Approximately 60% of persons with cancer will undergo surgery of some type, which includes preventative, diagnostic or staging, curative and palliative surgery. Curative surgery is a cancer treatment that may be used in conjunction with other therapies, such as the treatment of the present invention, chemotherapy, radiotherapy, hormonal therapy, gene therapy, immunotherapy and/or alternative therapies.

[0170] Curative surgery includes resection in which all or part of cancerous tissue is physically removed, excised, and/or destroyed. Tumor resection refers to physical removal of at least part of a tumor. In addition to tumor resection, treatment by surgery includes laser surgery, cryosurgery, electrosurgery, and miscopically controlled surgery (Mohs' surgery). It is further contemplated that the present invention may be used in conjunction with removal of superficial cancers, precancers, or incidental amounts of normal tissue.

[0171] Upon excision of part of all of cancerous cells, tissue, or tumor, a cavity may be formed in the body. Treatment may be accomplished by perfusion, direct injection or local application of the area with an additional anti-cancer therapy. Such treatment may be repeated, for example, every 1, 2, 3, 4, 5, 6, or 7 days, or every 1, 2, 3, 4, and 5 weeks or every 1, 2, 3, 4, 5, 6, 7, 8, 9, 10, 11, or 12 months. These treatments may be of varying dosages as well.

[0172] F. Other agents

[0173] It is contemplated that other agents may be used in combination with the present invention to improve the therapeutic efficacy of treatment. These additional agents include immunomodulatory agents, agents that affect the upregulation of cell surface receptors and GAP junctions, cytostatic and differentiation agents, inhibitors of cell adehesion, or agents that increase the sensitivity of the hyperproliferative cells to apoptotic inducers. Immunomodulatory agents include tumor necrosis factor; interferon alpha, beta, and gamma; IL-2 and other cytokines; F42K and other cytokine analogs; or MIP-1, MIP-1beta, MCP-1, RANTES, and other chemokines. It is further contemplated that the upregulation of cell surface receptors or their ligands such as Fas/Fas ligand, DR4 or DR5/TRAIL would potentiate the apoptotic inducing abililties of the present invention by establishment of an autocrine or paracrine effect on hyperproliferative cells. Increases intercellular signaling by elevating the number of GAP junctions would increase the anti-hyperproliferative effects on the neighboring hyperproliferative cell population. In other embodiments, cytostatic or differentiation agents can be used in combination with the present invention to improve the anti-hyerproliferative efficacy of the treatments. Inhibitors of cell adehesion are contemplated to improve the efficacy of the present invention. Examples of cell adhesion inhibitors are focal adhesion kinase (FAKs) inhibitors and Lovastatin. It is further contemplated that other agents that increase the sensitivity of a hyperproliferative cell to apoptosis, such as the antibody c225, could be used in combination with the present invention to improve the treatment efficacy.

[0174] Hormonal therapy may also be used in conjunction with the present invention or in combination with any other cancer therapy previously described. The use of hormones may be employed in the treatment of certain cancers such as breast, prostate, ovarian, or cervical cancer to lower the level or block the effects of certain hormones such as testosterone or estrogen. This treatment is often used in combination with at least one other cancer therapy as a treatment option or to reduce the risk of metastases.

[0175] IX. DUSP6, EBP50, and/or RhoGDIa in Breast Cancer and Resistance

[0176] In certain embodiments of the invention, an expression profile indicative of resistance to cancer therapy comprises one or more of DUSP6, EBP50, or RhoGDIa.

[0177] DUSP6 is a dual-specific phosphatase that dephosphorylates both pSer/Thr and pTyr. It is known to be specific for ERK1 and ERK2, but it does not dephosphorylate JNK or p38. It has been demonstrated to be a potential tumor suppressor in pancreatic tumor cells. The present invention demonstrates that DUSP6 (dual specificity phosphatase 6) (which at least may also be referred to as MAP kinase phosphatase 3 (MKP3), serine/threonine specific protein phosphatase, HGNC:3072, or PYST1) is involved in breast cancer, such as being involved in breast cancer resistance, and in specific embodiments DUSP6 is utilized at least in part as a marker of resistance. In specific embodiments, overexpression of DUSP6 is associated with breast cancer resistance (see Examples herein).

[0178] Although the expression level of DUSP6 is useful as a marker of breast cancer resistance, the expression level may be ascertained by any suitable methods in the art. For example, the expression level of DUSP6 may be determined as one of a plurality of polynucleotides being monitored for expression, such as with the methods of the present invention, or the expression level of DUSP6 may be identified alone. In specific embodiments, the expression levels of DUSP6 are identified based on RNA levels, based on corresponding protein levels, or both. The expression level of DUSP6 may be identified in a microarray, northern blot, western blot, quantitative RT-PCR, and so forth.

[0179] Additionally, or alternatively, the expression level of EBP50 and/or RhoGDIA may be ascertained by any suitable methods in the art, and the level may be determined alone or with a plurality of polynucleotides being monitored for expression. In specific embodiments, the expression levels of EBP50 and/or RhoGDIa are identified based on RNA levels, based on corresponding protein levels, or both. The expression level of EBP50 and/or RhoGDIa may be identified in a microarray, northern blot, western blot, RT-PCR, and so forth.

### EXAMPLES

[0180] The following examples are offered by way of example and are not intended to limit the scope of the invention in any manner.

### Example 1

### Exemplary Materials and Methods

Reagents, Hormones, and Antibodies

[0181] 17β-Estradiol (E2) and 4-hydroxy-tamoxifen (4-OH-Tam) were from Sigma (St. Louis, Mo.). ICI 182,780 was obtained from Astrazeneca (Macclesfield, UK). The MEK1,2 inhibitor PD98065 was from Calbiochem (La Jolla, Calif.). p-nitrophenyl phosphate (PNPP) and pNPP assay buffer were obtained from Upstate Biotechnology (Charlottesville, Va.). Antibodies used for immunoblotting were to; phospho-MAPK (Thr202/Tyr204), phospho-Ser118-ERα, and total MAPK p42/44 (Cell Signaling Technology, Beverly, Mass.); ERα (6F-11, Vector Labs Inc., Newcastle, UK); AIB1, p190 (BD Transduction Lab, Los Angeles, Calif.); ERK2 (C-14), PR(C-19, and H190), RhoGDI (Santa Cruz, Santa Cruz, Calif.); Cyclin D1 (Upstate Biotechnology); V5 (InVitrogen, Carlsbad, Calif.); HA (Covance, Berkeley, Calif.).

Tumor Specimens, Expression Microarray Analysis, and Semiquantitative RT-PCR

[0182] A cohort of frozen breast tumor specimens from nine patients who received adjuvant Tam was selected from the tumor bank of The Breast Center, Baylor College of Medicine, for use in the RNA analyses. This study was approved by the Baylor College of Medicine Institutional Review Board in accordance with federal human research study guidelines. Within this cohort, metastatic tumors from five patients who developed their recurrent lesion within 1-11 months while undergoing Tam treatment (Tam-resistant), and four primary tumors that were collected at the time of initial diagnosis from patients who remained disease-free with a median follow-up of 106 months (Tam-sensitive) were included.

[0183] Total cellular RNA was extracted from 100 mg of pulverized tumor powder using Trizol reagent (InVitrogen) followed by Qiagen RNeasy column purification (Qiagen, Valencia, Calif.). Double stranded cDNA synthesis, combined in vitro transcription (Enzo Biochem, New York, N.Y.), and biotin labeling was carried out in accordance with protocols recommended by Affymetrix (Santa Clara, Calif.). For each tumor specimen, 15 μg of cRNA was hybridized onto Affymetrix HGU95A GeneChips using recommended procedures for hybridization, washing, and staining with streptavidin-phycoerythirin.

[0184] The GeneChips were scanned, and feature quantitation was performed using MAS5.0 (Affymetrix). Data were normalized using mean intensity, and modeled to estimate expression using dChip analysis with the perfect match-only modeling algorithm (15); class comparisons were performed using BRB Array Tools developed by Richard Simon and Amy Peng and available on the World Wide Web, and t-tests were performed with randomized variance modeling. MKP3 expression data for Tam sensitive and resistant tumors are displayed using a box-and-whisker plot, and compared using a Wilcoxon rank sum test.

[0185] Semi-quantitative RT-PCR (sqRT-PCR) was performed of the tumor total RNAs subjected first to DNase treatment prior to cDNA synthesis and amplification. Briefly, primers to MKP3 and the GAPDH control gene were utilized. Duplicate reactions were prepared and samples were taken at alternating cycle numbers between 20 and 28 cycles to ensure that the sqRT-PCR reaction products were in a linear range of amplification. These samples were then diluted with μl loading buffere, and μl of each sample was loaded onto % acrylamide gels. After electrophoresis at 20V for 18 h, gels were fixed, transferred to filter paper, and dried. The absolute intensities of single bands for MKP3 and GAPDH were analyzed using phosphorimager quantification (Bio-Rad Laboratories, Hercules, Calif.). sqRT-PCR PCR product band intensities were then quantitatively compared with normalized, model-based estimates of expression from the GeneChip data.

Cells and Stable Transfection

[0186] MCF-7 cells were originally obtained from Dr. Benita Katzenellebogen, but have been maintained in the inventors' laboratory for over 10 years (Fuqua et al., 2000). MCF-7 cells were maintained in Minimal Essential Medium (MEM, InVitrogen) supplemented with 5% fetal bovine serum (Summit Biotechnology, Fort Collins, Colo.), 200 U/ml penicillin, and 200 μg/ml streptomycin. Cells were incubated at 37° C. in 5% CO₂. To generate MCF-7 cells stably overexpressing MKP3, 5 μg of the plasmid pcDNA3-MKP3-V5 (Furukawa et al., 2003) or empty vector (pcDNA3-His-V5, InVitrogen), were transfected into the cells using Fugene 6 reagent Roche Clinical Laboratories, Indianapolis, Ind.) in 100 mm tissue culture dishes following the manufacturer's protocol. Stable clones overexpressing MKP3 were selected as described (Fuqua et al., 2000), and positive clones were identified using immunoblot analysis with an anti-V5 antibody (1:5000 dilution)

Cell Extracts and Immunoblots

[0187] Cells grown in 100 mm dishes were starved in phenol red-free (PRF), serum-free MEM (Specialty Media, Phillipsburg, N.J.) for 48 hours, and were then treated for 2 hours with vehicle (ethanol), estrogen (100 nM, 20), or OHT (100 nM). After treatment, cells were rinsed twice with ice-cold phosphate-buffered saline (PBS) and were then lysed immediately with 200 μl of cell lysis buffer (20 mM Tris HCl, pH 7.4, 150 mM NaCl, 1 mM B-glycerophosphate, 1 mM sodium orthovanadate, and 10% glycerol plus 1:100 proteinase inhibitor cocktail III) (Calbiochem, LaJolla, Calif.) per 100 mm tissue culture. The cell lysates were cleared by centrifugation at 16,100×g for 10 minutes at 4° C. Protein concentration was determined with the BCA Protein Assay kit (Pierce, Rockfold, Ill.) according to the manufacturer's directions. Equal amount of cell extracts were resolved under denaturing conditions by electrophoresis in 8-10% polyacrylamide gels containing sodium dodecyl sulfate (SDS-PAGE), and transferred to nitrocellulose membranes by electroblotting (Schleicher & Schuell, Keene, NH). After blocking of the transferred nitrocellulose membrane with TBST (20 mM Tris pH 7.6, 150 mM NaCl, 0.1% Tween-20) supplemented with 5% non-fat milk for 1 hour at room temperature, the membrane was incubated with primary antibodies either for 1 hour at room temperature (anti-ERα, 1:100 dilution; anti-AIB1, 1:100 dilution; anti-ERK2, 1:500 dilution; anti-Cyclin D1,1:500 dilution; anti-PR, C-19, 1:200 dilution; anti-p190, 1:1000 dilution; anti-V5, 1:5000 dilution), or overnight at 4° C. (anti-phospho MAPK, 1:1000 dilution; anti-phosphor-Ser118-ERα; 1:1000 dilution; MAPK p42/44, 1:1000 dilution), incubated with secondary antibodies for 1 hour at room temperature and then developed with Enhanced Chemiluminescence Reagents (Amersham Pharmacia Biotech, Piscataway, N.J.).

Transient Transfection and Ubiquination Assays

[0188] Cells were staved in PRF MEM for 24 hours, and then 2×10⁶ cells were seeded into 100 mm tissue culture plates, and incubated for another 24 hours. Cells were transiently transfected with Fugene 6 reagent (Roche, Indianapolis, Ind.) following the manufacturer's protocol. Each plate was transfected with 1 μg pcDNA 3.1-PR-B (subcloned by BamHI digestion from pSG5-human PR-B clone (Richer et al., 1998) obtained from Dr. Kathryn Horwitz, University of Colorado Health Sciences Center, 1 μg MKP3-V5, and 3 μg pcDNA-HAUbiquitin (kindly provided by Dr. Xinhua Feng, Baylor College of Medicine). Twenty-four hours later, cells were switched to serum free, PRF MEM, incubated for another 24 hours. In some experiments were pretreated with the 50 μM MG-132 (Calbiochem, LaJolla, Calif.) for 2 hours, and then treated with vehicle (ethanol), estradiol (E2, 100 nM), or 4-OH-Tam (100 nM) for an additional 2 hours. Cells were then harvested in 1 ml cell lysis buffer supplemented with 50 μM MG-132. Cell lysates from each treatment were precleared with the addition of 50 μl 50% protein A slurry (Amersham), and immunoprecipitated with the addition of anti-PR antibodies C-19 and H190 (2 μg each), and 20 μl 50% protein A slurry. The pellets were collected by centrifugation, washed 3 times with 1 ml cell lysis buffer, solubilized by boiling in sodium dodecyl sulfate (SDS) loading buffer, and the proteins separated resolved under denaturing conditions by electrophoresis in 8-10% polyacrylamide gels containing SDS (SDS-PAGE), and transferred to nitrocellulose membranes (Schleicher & Schuell) by electroblotting. After blocking of the transferred nitrocellulose membrane with TBST supplemented with 5% non-fat milk for 1 hour at room temperature, the membrane was incubated with anti-HA antibody (anti-HA11, 1:1000 dilution) for 1 hour at room temperature, incubated with secondary antibody for 1 hour at room temperature, and developed with Enhanced Chemiluminescence Reagents (Amersham).

Immunoprecipitation and Phosphatase Assays

[0189] MKP3-overexpressing cells and control vector transfected cells were treated as described above with ethanol, E2, or 4-OH-Tam, and lysed in buffer B containing 20 mM Tris-HCl (pH 7.0), 150 mM NaCl, 1% Triton X-100, 0.25 M sucrose, 1 mM EDTA, 1 mM EGTA, 0.1% β-mercaptoethanol, 1 mM PMSF, and 1 μg/ml leupeptin. The cell lysates were cleared and the protein concentrations were determined as detailed above. 300 μg of cell lysate at 1 μg/μl was immunoprecipitated by the addition of 1 μg anti-V5 antiserum, and 20 μl 50% protein G slurry. After three times washing of the pellets with 1 ml buffer B, a phosphatase reaction (Kim et al., 2003) was initiated by the addition of 50 mM pNPP in 80111 of 50 mM Tris-HCl (pH 7.0), and incubated at 30° C. for 1 hour. The reactions were then quenched by the addition of 20 μl 5N NaOH, and pNPP hydrolysis was measured at 405 nm. The nonenzymatic hydrolysis of the substrate was corrected by measuring the control vector transfected immunoprecipitates. The amount of product p-nitrophenol was determined from the absorbance at 405 nm. The phosphatase assays were performed in triplicate, n=3 separate experiments. To detect MKP3 protein in the extracts, duplicate immunoprecipitates were resolved by SDS-PAGE, transferred to nitrocellulose, and immunobloted with anti-ERK2 antibody. After exposure, the same nitrocellulose filter was then stripped in the stripping solution (Pierce), and reimmunoblotted with anti-V5 antibody.

Xenograft Studies

[0190] MCF-7 vector control and MKP3-transfected cells were established as xenografts in ovariectomized 5- to 6-week-old BALB/c athymic nude mice (Harlan Sprague Dawley, Madison, Wis.) supplemented with 0.25-mg 21-day-release E2 pellets (Innovative Research, Sarasota, Fla.) by inoculating the mice subcutaneously with 5×10⁶ cells, as described previously (Osborne et al., 1995). When tumors reached ˜250 mm³ (i.e., in 21 days) animals were randomly allocated to continue E2 (n=6 per group), or to estrogen withdrawal plus tamoxifen citrate (+Tam, n=6 per group; 500 μg/animal given subcutaneously in peanut oil, 5 days/week) for another 30 days. Tumor growth was assessed and tumor volumes were measured as described previously (Osborne et al., 1995). Mice were anesthetized with isoflurane before tumor removal; tumor tissues were kept at −190 0 C for later analyses. Animal care was in accordance with institutional guidelines.

Anchorage-Independent Growth Assays

[0191] Cells were starved for 2 days in PRF MEM (InVitrogen) supplemented with 5% fetal bovine serum (FBS, Summit Biotechnology, Fort Collins, Colo.), 6 ng/ml insulin, 200 units/ml penicillin, and 200 μg/ml streptomycin. Soft agar assays were performed in sixwell plates. Into each well, 1.5 ml of prewarmed (50° C.) 0.7% SeaPlaque agarose (FMC, Rockland, Me.) was added and dissolved in PRF MEM supplemented with 5% charcoal stripped FBS (Summit, Fort Collins, Colo.) to serve as the bottom layer, and allowed to solidify at 4° C. until to use. 0.5×10⁴ cells as a single cell suspension were suspended in prewarmed (37° C.) of the same media, 4 ml of 0.5% SeaPlaque agarose was then added, and this suspension then plated as the top layer by adding it dropwise to the solidified bottom layer plates. Plates were cooled for 2 hours, and then transferred to a 37° C. humidified incubator. Two days after plating, media containing control vehicle, 1 nM estradiol, 100 nM 4-OH-Tam, 100 nM OHT plus 10 nM ICI, or 100 nM OHT plus 20 nM PD98065 was added to the top cell layer, and the appropriate media was replaced every two days. After 14 days, the colonies were fixed, and the colony number of colonies >50 cells from quadruplicate assays were then counted. The data shown is the mean colony number of four plates, and is representative of two independent experiments.

### Example 2

### MKP3 Overexpression and TR

[0192] To identify genes whose expression is associated with the development of TR, compared primary tumors with metastatic tumors that arose during adjuvant Tam treatment using expression microarray and sqRT-PCR analyses. The approach and tumor selection criteria differed from that recently reported by Ma et al. (2004), who compared primary tumors of patients that were disease-free after adjuvant Tam treatment to primary tumors of patients that recurred with a median time to recurrence of 4 years to generate a gene expression profile to predict clinical outcome (Ma et al., 2003). In specific embodiments, it is more likely to identify genes whose differential expression reflected acquired TR with this selection criteria, and whose function might itself be affected by Tam treatment.

[0193] Gene expression analysis of the cohort identified MKP3 as being more highly expressed in the Tam-resistant tumor group as compared to the Tam-sensitive tumor group (p<0.007, FIG. 3). The data is shown in the form of a whisker box plot where the minimum, maximum, 25th, and 75th percentiles are presented. To confirm the measurement of MKP3 RNA levels, expression values derived from the Affymetrix data were correlated with values obtained from sqRT-PCR of RNA from individual tumors (Table 1 elsewhere herein).

[0194] Differentially expressed genes were identified using two sample t-test and classifiers predicting resistance were determined at either the p=0.01 level of significance (Table 1) or p=0.05 level of significance (Table 2). These genes showed 1.2-5.3-fold decreases or 1.2-2.8-fold increases in geometric mean gene expression in resistant compared to sensitive tumors.

[0195] To generate a model of TR, ERα-positive MCF-7 cells were stably transfected with either empty vector plasmid as a control, or a plasmid encoding MKP3. Cells were drug selected for plasmid expression, cloned by limiting dilution, and several resulting clones were screened for expression of MKP3 using an anti-V5 antibody to the V5 tag introduced at the carboy-terminus of MKP3 (Fuqua et al., 2003). An immunoblot analysis of two MCF-7-control clones (FIG. 4A, Con 1 and 2) and two MCF-7-MKP3-overexpressing clones (FIG. 4A, MKP3-1 and 2) demonstrates ectopic expression of MKP3 in the stable transfectants. Subsequent stripping and reprobing of the membrane with P190 antibodies verified equal sample loading.

[0196] In pancreatic cells, ectopic expression of MKP3 is reported to result in a suppression of cell growth (Fuqua et al., 2003). Thus, the growth characteristics of the MCF-7 stable MKP3 transfectants under different hormonal conditions were investigated using anchorageindependent soft agar assay (FIG. 4B). As expected, MCF-7 vector control cells exhibited low colony formation in the absence of E2 (C1 and C2, C treatment); treatment with E2 increased the number of colonies, and Tam treatment reduced the number of colonies of control cells. Ectopic expression of MKP3 reduced the number of colonies formed in soft agar in estrogen-deprived conditions (MKP3-1 and MKP3-2, C), however the estrogen-induced colony formation of the MCF-7-MKP3 clones was equivalent to those obtained with vector control cells. In contrast, the number of soft agar colonies formed in the presence of Tam was increased ˜20-fold in the two MKP3-overexpressing transfectants compared to vector control cells (P<0.05). Both the steroidal ERα antagonist ICI182,780, and the MEK1,2 inhibitor PD98065 completely blocked Tam-induced colony formation in vector control and MKP3-transfected cells. These results indicate that whereas the basal growth of MCF-7-MKP3 cells may be negatively affected concomitant with MKP3 overexpression, Tam treatment might either relieve this growth suppression or act as an agonist to increase the colony forming efficiency of MKP3-overexpressing breast cancer cells.

[0197] To analyze the endocrine sensitivity of the MKP3-overexpressing cells in more detail in vivo, the ability of MCF-7-vector control 1 and MCF-7-MKP3-2 transfectants to form tumors in athymic mice was examined. Xenografts were established in ovariectomized mice supplemented with estrogen for 21 days. Mice were then randomized to continue estrogen treatment, or estrogen withdrawal plus Tam, and tumor growth was monitored over time (FIG. 4C). The main questions that were addressed were whether MKP3-expressing tumors grew differently in the presence of estrogen, and whether they responded similarly to Tam treatment. This was examined by fitting the data in an exponential growth model, and testing whether growth rates were different between the groups; the analyses were done separately for estrogen-treated (FIG. 4C, left panel) and Tam-treated animals (right panel). There was no difference in the estrogen-stimulated growth of the MCF-7-vector control and MKP3-overexpressing cells (P=0.52). However, the growth rate of MKP3-expressing cells was significantly increased in Tam-treated tumors (P=0.047). These in vivo data are thus consistent with the observed effect of Tam treatment on MKP3-overexpressing cells in the colony formation assay, and with the discovery of higher levels of MKP3 RNA in Tam-resistant metastatic breast tumors.

Cross-Talk Between MKP3, MAPK, and ERα Signaling Pathways

[0198] MAPK activity is tightly regulated by phosphorylation and dephosphorylation. MKP3 participates in a bidirectional regulatory loop with ERK2 MAPK, whereby ERK2 substrate binding is associated with catalytic activation of MKP3, and activated MKP3 negatively regulates pERK2 (Camps et al., 1998). Since there are conflicting reports concerning whether estrogen stimulation activates MAPK in MCF-7 breast cancer cells (Lobenhofer et al., 2000; Migliaccio et al., 1996), it was next assessed the effect of estrogen or Tam on the activation of MAPK in MCF-7 vector controls and MKP3 transfectants (FIG. 5A, Con1 and 2, and MKP3-1 and 2). Cells were maintained under estrogen-depleted conditions for 2 days, treated for 2 hours with either estrogen or Tam, and cellular extracts prepared. Immunoblot analysis with anti-V5 was used to detect ectopic MKP3 expression in the two MKP3 transfectants (FIG. 5A, top panel). FIGS. 5B and 5C provide quantitation of results in FIG. 5A.

[0199] In vector-alone transfectants, pMAPK was not induced with either short-term (2-30 minutes, data not shown), or two hours of hormonal treatment (FIG. 5). In contrast, higher levels of pMAPK were seen in the control and Tam-treated MKP3-overexpressing cells compared to that seen in the estrogen-treated cells (FIGS. 5A and 5B). These results were rather paradoxical, in that the inventors predicted to find lower levels of pMAPK in cells concomitant with MKP3 overexpression, but instead observed hormonal influences on the ability of overexpressed MKP3 to modulate pMAPK. Levels of total MAPK did not appear to be affected by MKP3 overexpression. The highest activation of MAPK was observed in the Tam-treated MKP3-overexpresing cells (graphically represented in FIG. 5B).

[0200] ERα is a downstream target of pMAPK in breast cancer cells (Kato et al., 1995). It was observed that levels of phosphorylation at ERα serine 118 (PS 118 ERα) were highly induced with Tam treatment in the MKP3 transfectants (FIGS. 5A and 5C). The question is whether this dramatic induction was coupled with changes in the levels of total ERα? It has been demonstrated that ERα undergoes estrogen-dependent down regulation via the proteasomal degradation pathway (Nawaz et al., 1999). Down regulation of ERα protein was observed in both control transfected and the MKP3 overexpressing cells in the presence of estrogen. Similarly, it has been reported that Tam stabilizes the receptor (Wijayaratne and McDonnell, 2001), and this stabilization was observed in both groups of transfectants. Thus, although ERα hormonal regulation appeared to proceed normally, higher levels of pERα were induced by Tam in the MKP3 overexpressing cells, which was not associated with higher levels of total ERα as compared to control treated cells.

[0201] The effect of the MEK1,2 inhibitor PD98059 was tested on the ability of Tam to induce phosphorylation of MAPK and ERα in MKP3 overexpressing cells (FIG. 5E). It was found that PK98065 effectively inhibited the increase in pMAPK and pS118 ERα in control and Tam-treated MKP3.2 cells. The MEK inhibitor also blocked activation of MAPK in vector control cells under all the treatment conditions. This result suggests that Tam's effects in MKP3 overexpressing cells involve the MEK-ERK MAPK signaling pathway.

[0202] As a control the levels of MKP1 were examined, which is more specific for JNK and p38, but did not see changes in the levels of MKP1 concomitant with MKP3 overexpression (FIG. 5F). Similarly, no activation of p38 or changes in total p38 in MKP3 transfectants were seen. However, there was a surprising increase in pJNK in MKP3 transfectants under all hormonal conditions. When vector control cells were treated with the MEK1,2 inhibitor, pJNK was elevated, and higher levels of activation were observed in MKP3 transfectants in the presence of the inhibitor. These results were not expected, and in a specific embodiment indicates that the MEK inhibitor affects the decreased levels or activity of another MKP that up-regulates pJNK. In specific embodiments of the invention, this indicates that treatment of breast cancer cells with MEK inhibitors will concomitantly increase JNK signaling in cells, a consequence that has therapeutic relevance in resistant disease necessitating combination therapy with signal transduction inhibitors, in particular aspects of the invention.

[0203] The observed changes in pMAPK levels in MKP3 overexpressing cells was further characterized. It was questioned whether either changes in MKP3 phosphatase activity or changes in binding between MKP3 and ERK2 might underlie the changes in pMAPK. Using the artificial substrate pNPP to measure endogenous phosphatase activity, there was an inverse relationship between measured phosphatase activity and pMAPK levels in the MKP3 transfectants. As shown in FIG. 5G, levels of phosphatase activity were highest in the estrogen-treated, lowest in Tam, and intermediate in the control-treated cells. These findings in activity were inversely related to the levels of pMAPK in MKP3 overexpressing cells (FIG. 5A). These results indicate that Tam influences the ability of MKP3 to negatively regulate MAPK, in specific embodiments. There were no observed changes in the ability of MKP3 to bind to MAPK, as measured by co-immunoprecipitation and immunoblot analysis (FIG. 5H). When the levels of MKP3-bound ERK2 were compared between the different hormonal treatments, no differences were detected (C, E, T, IP:V5 lanes). Control levels of MKP3 and ERK2 were also examined in the pre-IP and post-IP extracts to ensure that adequate pulldown of IP proteins were obtained; no differences were detected. Thus, hormonal modulation of MKP3 phosphatase activity, but not changes in the ability of MKP3 to interact with MAPK may be a determinant of MAPK activation in breast cancer cells.

### Example 3

### DUSP6 (MKP3) as a Coactivator of Estrogen Receptor

[0204] There are a large number of estrogen receptor (ER) coregulatory proteins that function as signaling intermediates between the ERs and the general transcriptional machinery (for reviews, see McKenna et al. 1999, and Horwitz et al. 1996). These coregulatory proteins are components of a complex of proteins bound to the nuclear receptors, and their presence or absence can help determine if the receptors act as a transcriptional repressor or activator. Some of the coregulatory proteins, called coactivators, possess enzymatic activity, but the precise mechanism by which coactivators enhance ER transactivation function remains to be determined. The receptor interacting motif LXXLL (called the ‘NR’ box; SEQ ID NO:167) has been identified within nearly all coactivators, and these residues are indispensable for receptor interaction with coactivators (Heery et al. 1997). It may be a relative imbalance of coregulator proteins that ultimately determine ER's function and tamoxifen resistance in individual breast cancer patients, as indicated for MKP3 overexpression in patients.

[0205] Two NR boxes were identified in MKP3 (residues #114-123, FIG. 6), indicating that MKP3 interacts with the ER and function as a receptor coactivator, in specific aspects of the invention. To demonstrate that MKP3 expression acts to increase ERα transcriptional activity (thus is a coativator), transient transactivation assays were employed using an estrogen-responsive luciferase reporter. Exogenous expression of MKP3 in two breast cancer cells lines (MCF-7 and MDA-361) increased ERα transcriptional activity (FIG. 7). MKP3 also increased progesterone receptor, androgen receptor, and retionoic acid receptor activities (FIG. 8). Thus, similar to almost all coactivators that have been discovered, MKP3 acts as a coactivator on a number of different nuclear receptors. It is also shown that MKP3 enzymatic activity is not required for it to function as a coactivator by deletion of the MKP3-residues critical for its activity (FIG. 9). MKP3 is not a general transcriptional activator, however, thus demonstrating specificity for nuclear receptors (FIG. 10). These results indicate that MKP3 in specific embodiments is mechanistically functioning directly through the ER to cause tamoxifen resistance; however, it might also be acting indirectly through its regulation of Erk1/2 MAPK, a pathway which can then affect ER function (FIGS. 5A and 5D).

### Example 4

### ER Regulated Gene Transcription

[0206] The cell cycle regulatory protein cyclin D1 (CCND1) is amplified and/or overexpressed in breast cancer, and higher levels have been associated with TR in the clinical setting (Stendahl et al., 2004). CCND1 is an estrogen-induced protein, and is also a downstream marker of activated MAPK signaling in breast cancer cells (Doisneau-Sixou et al., 2003). High levels of CCND1 were found in Tam-treated MKP3 overexpressing cells using immunoblot analysis (FIG. 1I A, top panel); densitometric scanning of the CCND1 immunoblot is shown in FIG. 11B. Thus, the Tam-stimulated soft agar growth and xenograft growth that was observed concomitant with MKP3 overexpression was coupled with the induction of the MAPK downstream marker of proliferation, CCND1.

[0207] Similarly, the progesterone receptor (PR) A and β forms are induced by estrogen, and recently reported that a change in the ratio of PR-A to PR-B in breast cancer predicts for a poor response to adjuvant Tam therapy (Hopp et al., 2004). As expected with two hours of estrogen treatment, no induction of the two PR isoforms were detected in either the control vector (Con 1 and 2), or in the MKP3-transfected cells (FIG. 11A). However, there was a striking diminution of PR-B levels in the two MKP3 transfectants treated with Tam, which was not observed in the control MCF-7 transfectants. In contrast, the levels of the estrogen-inducible amplified in breast (AIB) ER coactivator protein (Anzick et al., 1997) were unchanged with MKP3 overexpression; P190 was used as a loading contol in these experiments (lower panel). Furthermore, it was found that the MEK1,2 inhibitor PD98059 blocked tamoxifen induction of CCND1, and restored PR-B levels in MKP3 overexpressing cells (FIG. 11C).

[0208] How might MKP3 be influencing PR-B levels? It has been shown that progestin-mediated degradation of PR-B occurs by a mechanism involving pMAPK. Therefore, PR ubiquitination in MKP3 overexpressing cells was examined (FIG. 11D). To demonstrate ubiquitin-conjugated PR-B, HA-tagged ubiquitin and PR-B were transiently overexpressed in HeLa cells by cotransfection of the two plasmids. Cells were treated with E2 or Tam for 2 hrs in the presence of a proteasomal inhibitor to allow for the accumulation of PR-ubiquitin conjugates. PR-B was then immunoprecipitated and visualized by immunoblotting with HA-specific antibody. The level of polyubiquitin-conjugated PR-B was increased in Tam-treated cells which correlated with the lower steady state levels of PR-B in MKP3 overexpressing cells. These results suggest that the Tam-resistant phenotype of the MKP3 overexpressing cells is associated with two biomarkers of clinical resistance, elevated CCND1 and altered PR-A to PR-B ratios, downstream of MAPK activation.

### SUMMARY

[0209] The development of tamoxifen resistance (TR) is most frequently associated with the continued presence of ERα at the time of tumor progression (Encamacion et al., 1993). One current hypothesis is that ERα remains essential to the problem of resistance, due to its molecular crosstalk with growth factors, and/or downstream intracellular signaling molecules. Support for this hypothesis is garnered by data showing that overexpression of specific genes into ERα-positive cells, such as the growth factor receptors EGFR (Knowlden et al., 2003) and HER-2/neu (Benz et al., 1993), the receptor tyrosine kinase EphA2 (Lu et al., 2003), the tyrosine kinase Akt-3 (Faridi et al., 2003), and the ERα coactivator AIB (Loui et al., 2004), all promote tamoxifen-resistant growth. Recently, the growth factor receptor tyrosine kinase inhibitor gelfitinib, and HER-2/neu receptor blocking antibodies have been used to restore tamoxifen's growth-inhibitory effects in Tam-resistant breast cancer cells (Moulders et al., 2001; Shou et al., 2004) There is also a growing body of evidence implicating the mitogen-activated protein kinase extracellular signal-regulated-kinases ERK 1,2 MAPKs in the growth factor phosphorylation cascade, and its interaction with ERα signaling in TR (Kurokawa et al., 2000). Indeed, phosphorylation of ERK 1,2 MAPK has been associated with a poorer quality of response to tamoxifen in breast cancer patients (Gee et al., 2001).

[0210] It is known that ERα can be phosphorylated by activated MAPK, resulting in ligand independent ER activity (Kato et al., 1995). An emerging area of research in MAPK signaling is the role of specific protein phosphatases in the control of MAPK activation, and their role in specific biological responses. MAPK phosphatase 3 (MKP3, also called dual specificity phosphastase 6 DUSP6 and Pyst1) is a member of a phosphatase family that inactivates MAPK function by dephosphorylating both phosphoserine/threonine and phosphotyrosine residues [reviewed in (Camps et al., 2000)]. MKP3 is in a regulatory feedback loop with ERK 1,2 MAPK because it is both activated by binding to ERK2, and reciprocally inactivates this MAPK (Zhou et al., 2001).

### Example 5

### Significance of MKP3 Embodiments

[0211] Tam has been the most frequently prescribed antiestrogen for the treatment of women with early-stage and metastatic ERα-positive breast cancer. Although many patients will initially benefit from Tam treatment, the emergence of resistance is a major clinical problem. ERα and PR status have been used for over 30 years to predict response to Tam in the clinical setting (Early Breast Cancer Trialists' Collaborative Group, 1998; Bardou et al., 2003). Recent evidence demonstrates the activation of HER-2 and/or ERα coregulatory proteins, such as AIB1, in a subset of patients with Tam resistance (Osborne et al., 2003; Gutierrez et al., 2005). There is also preclinical evidence that a number of diverse receptor tyrosine kinases, such as the EphA2 receptor (Lu et al., 2003) and the epidermal growth factor receptor (Knowlden et al., 2003), or intracellular signaling molecules AND-34/BCAR3 (Felekkis et al., 2005), AKT3 (Faridi et al., 2003) and pMAPK (Gee et al., 2001) could be significant in the development of resistance to hormone therapy. It has been hypothesized that these pathways might impact on ERα activity, and hence Tam effectiveness. It has also been shown that PKA activation, via down-regulation of a negative regulator of PKA (PKA-R1α), is associated with resistance through signaling to ER α (Michalides et al., 2004). Thus, there are multiple feedback systems between ER α and other intracellular signaling effectors which can contribute to resistance, and have examined herein a MAPK signaling network which contributes to the therapeutic response of breast cancer cells. Increased dependence on MAPK signaling has been previously demonstrated to be important for both TR and adaptive resistance to estrogen deprivation in MCF-7 cells (Larsen et al., 1999; Song et al., 2002). The inventors identified MKP3, a negative regulator of MAPK, as being expressed at higher levels in Tam-resistant metastatic lesions, and demonstrated in preclinical studies that its overexpression can confer Tam-resistant growth of MCF-7 cells in vitro or as xenografts in athymic nude mice.

[0212] The inventors employed microarray expression profiling to identify genes associated with Tam resistance in breast cancer patients as a means of exploring new regulatory mechanisms operative during the selective pressure of Tam treatment. Microarray studies are increasingly being employed to develop prognostic and predictive models of patient outcome in breast cancer (Chang et al., 2005). Recently a two-gene expression Tam prediction model was developed using microarray analysis comparing primary breast tumors from patients treated with adjuvant Tam who remained disease-free, to those patients who developed distant recurrence (Ma et al., 2004). Although these results have been recently challenged (Reid et al., 2005), microarray technologies have shown great promise in identifying molecular features of hormone responsiveness (Jansen et al., 2005). However, the development of reliable predictive models will undoubtedly require large sample sizes due to the heterogeneous nature of breast cancer, and the multifactoral problem of treatment resistance. The present invention differed in both experimental design and goal compared to the microarray study of Ma et al. (2004). Although the inventors used a similarly-defined Tam sensitive group of primary tumors, they chose to compare these to metastatic lesions from patients who recurred while on Tam, with the goal to identify gene candidates that could then examine further for a mechanistic role in resistance. They did not seek to identify a predictive Tam response expression profile due to the small number of metastatic lesions available for analysis. It is unfortunate that metastatic lesions are infrequently biopsied for diagnostic purposes in recurrent breast cancer, which will ultimately limit the development of reliable predictive studies with these lesions.

[0213] Neither Ma et al. (2004), or a similarly designed microarray study reported by Jansen et al. (2005) found MKP3 RNA levels to be differentially associated with the outcome of Tam-treated primary tumors. This difference can be attributed to either experimental design, or in the diverse array platforms utilized between the studies. Interestingly, it was found that the levels of pMAPK protein were highest in Tam-treated and lowest in the presence of estradiol when MCF-7 cells were engineered to overexpress MKP3. Furthermore, it was found that MEK inhibition reversed Tam-induced soft agar growth of MKP3 overexpressing cells, further implicating MAPK signaling in resistance in the model. This result indicates that activated MAPK remains a common component of Tam-resistant growth in the preclinical model.

[0214] The inventors demonstrated that MKP3 enzymatic activity was particularly sensitive to regulation by hormones, and propose that its hormonal modulation may be an alternative and novel mechanism by which ERK1,2 can be activated and regulated in breast cancer cells. Several of the MKPs are known to be induced following exposure to stress and/or growth factor stimulation (Camps et al., 2000), however MKP3 has not been previously demonstrated to be regulated by these stimuli. MKP3 has been shown to be transcriptionally up-regulated after activation of the ERK2 pathway (Camps et al., 1998). The control of MKP3 activity at the post-transcriptional level is not well understood, however a direct physical interaction with ERK2 is known to increase its activity several fold (Zhou et al., 2001). In specific embodiments, MKP3 is a novel target of Tam action in breast cancer cells in patients following prolonged MAPK activation during adjuvant Tam treatment. It is possible that tumors may compensate for chronic activation of MAPK by up-regulation of phosphatases, such as MKP3, that control these pathways. The emergence of Tam resistance may therefore involve the disruption of this regulatory compensatory loop by inactivation of MKP3 phosphatase activity explaining the seemingly paradoxical up-regulation of MKP3 levels, but down-regulation of its activity in Tam-treated MKP3 overexpressing cells. Since MKP3 has been shown to be a relatively unstable protein (Warmka et al., 2004), it may be a particularly susceptible target during breast tumorigenesis.

[0215] Sustained activation of MAPK has been observed in a number of systems, and does not always correlate with upstream Ras-Raf-MEK1,2 activities. For instance, carcinogenic activation of ERK1,2 in human lung cancer cells triggers MKP1 degradation via the ubiquitin-proteasome pathway (Lin et al., 2003). Constitutive induction of pERK1,2 in the senescence of human diploid fibroblasts has been shown to be associated with reduced MKP3 and protein phosphatase 1/2 activities (Kim et al., 2003). Similar to this above report, found that there were no differences in the levels of MAPK bound to MKP3 in the MKP3 overexpressing cells, irrespective of hormonal stimulation, suggesting that pMAPK levels could be explained by a modulation of MKP3 activity, and perhaps influences on other as yet unidentified phosphatases.

[0216] There is also evidence for multiple, temporally discrete pathways which differentially regulate MAPK depending on the external stimulus (Grammer and Blenis, 1997). For instance, phosphatidylinositol-3 kinase (PI3K) and protein kinase C (PKC) isoforms have been shown to be important for MEK-independent, sustained MAPK activation in Swiss 3T3 fibroblasts (Grammer and Blenis, 1997). Fibroblast growth factor (FGF) 1 and heregulin 1-induced TR in MCF-7 cells is also associated with prolonged MAPK activation that is incompletely susceptible to MEK inhibitors (Thottassery et al., 2004). The results indicate that Tam increases ERK1,2 activity via the loss of MKP3 phosphatase activity, an alternative “off-off” mechanism of resistance which remains sensitive to MEK inhibition. Therefore, patients with Tam-resistant disease and elevated MKP3 may be markedly sensitive to MEK inhibitors.

[0217] ERα expression is lost in a minority of recurrent metastatic lesions after Tam treatment (Gutierrez et al., 2005). The retention of ERα suggests that it may continue to play a role during the development of resistance. ERα levels were unchanged when overexpressed MKP3 in MCF-7 cells, and displayed the expected estrogen regulation. This is in contrast to that seen for ERα levels when various growth factor signaling components are overexpressed in MCF-7 cells. For instance, overexpression of constitutively active forms of Raf-1 and MEK1, which activate pMAPK, leads to a down-regulation of ERα that can be reversed with MEK inhibitors (Oh et al., 2001). Recently, it has been shown that nuclear factor-κB may be partially involved in the down-regulation of ERα with activated Raf-1 and MEK1 (Holloway et al., 2004). Thus, the model is different from hyperactivation of the Raf1/MEK1 signaling pathway on ERα, and potentially reflects the more common resistance mechanisms associated with continued ERα expression in patients.

[0218] There are a variety of phosphorylation sites within ERα which modulate a number of different functions, such as transcriptional activity and hormonal sensitivity, which are sites for cross-talk with signal transduction pathways. The inventors have shown that PKA signaling induces ERα S305 phosphorylation, which is coupled to acetylation at K303 within the hinge domain and estrogen sensitivity (Cui et al., 2004). This site has been demonstrated to be important for Tam resistance (Michalides et al., 2004) and expression of CCND1 (Balasenthil et al., 2004). A major site of phosphorylation in response to estrogen is ERα S118, which is located in the hormone-independent, activation function (AF)-1 region of the receptor (Le Goff et al., 1994), although this finding has been disputed by the inability of some investigators to induce pMAPK with estrogen in different MCF-7 sublines (Lobenhofer and Marks, 2000). The ERα S118 site is also phosphorylated in response to epidermal growth factor signaling, possibly via pMAPK (Bunone et al., 1996). There is in vitro evidence that S118 is phosphorylated by activated ERK1,2 in breast cancer cells (Kato et al., 1995). ERα S118 was phosphorylated in response to Tam in MKP3 overexpressing cells, which was associated with higher pMAPK levels. This indicates that ERα pS118 may be a marker of resistance in the model. However, high levels ERα pS118 have been shown to be associated with a better disease outcome in breast cancer patients treated with Tam in one clinical study (Murphy et al., 2004). Therefore the usefulness of pS118 as a clinical marker of resistance requires further study. There is some evidence that estrogen-induced phosphorylation of ERα S118 may be independent of ERK1,2 activation, increasing the complexity in dissecting the role of S118 in ERα function (Joel et al., 1998).

[0219] Up-regulation of CCND1 via ERα signaling is associated with an increased proliferation response in breast cancer cells (Prall et al., 1998), and CCND1 overexpression is predictive of TR in patients (Stendahl et al., 2004). It was found that CCND1 was elevated in Tam-treated MKP3 overexpressing cells, which is consistent with the above experimental and clinical data. PR status is also a useful predictive factor for Tam response (Bardou et al., 2003). Approximately 30% of patients are ERα-positive, but PR-negative, and respond poorly to Tam (Bardou et al., 2003). The molecular mechanisms associated with the resistant phenotype of PR-negative patients is not understood, but there is some evidence to indicate that low PR levels may be the result of elevated growth factor signaling (Cui et al., 2003). It was recently reported that patients with low PR-β-form expression were significantly more likely to relapse with Tam therapy (Hopp et al., 2004). The previous clinical study is consistent with the finding herein that levels of PR-B were lower in Tam-treated MKP3 overexpressing cells. Hyperactivation of MAPK in Tam-treated MKP3 transfectants resulted in an increase in ubiquitination of PR-B, a result confirming data showing that activated MAPK signals the degradation of PR by the 26S proteasome (Lange et al., 2000).

[0220] Activation of JNK with MEK1 inhibitor treatment of MCF-7 cells was detected, with further enhanced JNK phosphorylation noted in the MKP3 overexpressing cells. There was no observation of activation of p38 MAPK. In specific aspects of the invention, the molecular mechanism associated with these enhanced pJNK levels is further characterized, but it does not appear to be associated with decreased levels of MKP1, since MKP1 levels were unchanged either with MEK inhibitor treatment, or MKP3 overexpression. Whether down-regulation of other MKPs may be associated with this effect, and whether combined MAPK inhibitors with Tam treatment are efficacious in the model is investigated.

[0221] Many patients with ERα-positive tumors unfortunately fail Tam therapy. There is a critical need to find biomarkers which accurately identify those patients who will not benefit from Tam treatment. The results of the Arimidex or Tamoxifen Alone or in combination (ATAC) study demonstrated a major benefit for Arimidex in the ERα-positive, PR-negative subgroup of patients compared to Tam treatment alone (Baum et al., 2002; Dowseft, 2003). In specific aspects of the invention, MKP3 expressing tumors might similarly be sensitive to estrogen deprivation (Arimidex treatment), given the finding that there was limited growth of MKP3 overexpressing cells in the absence of estrogen. In summary, this invention indicates that at least MKP3 is an attractive new diagnostic and therapeutic target in breast cancer.

### Example 6

### Expression of EBP50 is Associated with Resistance to Tamoxifen

[0222] Estrogen is critical for mammary gland development and implicated in breast cancer tumorigenesis and progression, thus the disruption of estrogen signaling via targeting its receptor (ER) is a promising treatment strategy for breast cancers. Tamoxifen (Tam) is the most frequently prescribed antiestrogen for the prevention and treatment of ER positive breast cancers, but while Tam is initially useful in many breast cancer patients, metastatic lesions would recur during TAM treatment, defined as acquired tamoxifen resistance (TR). Current studies suggested that acquired TR is associated with downregulation of estrogen-induced genes, such as progesterone receptors, and/or overexpression of estrogen-repressed genes, such as AIB1 and HER-2/neu. The inventors and others have found that estrogen also regulates the expression of a number of cytoskeleton organizers, such as EBP50, Ezrin, and moesin in breast cancer cells, but their involvement in TR has not been studied. Estrogens and antiestrogens are known to impact on cell cytoarchitecture by affecting adhesion structures and the rearrangement of intermediate and actin filaments (Sapino A., et al. 1986.) Estrogens are known to increase, and antiestrogens like tamoxifen, decrease the expression of the sodium hydrogen exchanger regulatory factor NHE-RF, also known as ezrin binding protein 50 (EBP50) (Ediger T R, et al. 1999. EBP50 acts as a multifunctional adaptor/scaffolding protein and it may play a role in signal transduction pathways and the cytoarchitecture in breast cancer (Stemmer-Rachamimov, A O, et al. 2001.

[0223] To explore whether expression of these genes are associated with resistance, expression profiled study two groups of tumors: Tam Sensitive (TS, n=5) were primary tumors from patients who were treated with Tam and had not experienced a recurrence within 7-10 years of follow up, and TR tumors (n=5) were metastatic breast tumors from patients who were treated with Tam and whose metastatic lesions recurred while on treatment. The inventors found that EBP50 expression was significantly downregulated in the TR group of tumors. Furthermore, EBP50 expression was downregulated in a TR cell line model which was generated from ER-positive T47D breast cancer cell line genetically engineered to overexpress metastasis-associated protein 2 MTA2. These data suggest that EBP50 expression is inversely related to resistance, and suggest that cytoskeleton reorganization and/or signaling may be important for the development of TR.

[0224] FIG. 12 shows identification of exemplary altered gene expression associated with tamoxifen resistance in breast tumors. Recently investigators have used microarray profiling of primary tumors to identify genes whose expression is associated with response to tamoxifen. The inventors have taken a different approach and have compared the gene expression profiles of primary tumors compared to metastatic tumors which have arisen in spite of tamoxifen treatment. The approach was aimed at identifying altered genes expression associated with acquired or adaptive resistance.

[0225] FIG. 13 shows comparison of EBP50 RNA levels in tamoxifen-sensitive and tamoxifen-resistant breast tumors. EBP50 levels were determined using Affymetrix U95A human GeneChip arrays employing dChip for normalization and estimation of expression values. The mean levels of EBP50 were reduced in the tamoxifen-resistant (TR) tumors compared to tamoxifen-sensitive tumors (TS). This difference was statistically significant, with p=0.02 using a t-test.

[0226] FIG. 14 shows overexpression of MTA2 in T47D cells is associated with hormone-independent and tamoxifen-resistant growth in soft agar. Metastasis associated protein 2 (MTA2), also known as PID, is contained in nucleosome remodeling and histone deacetylation (NuRD) complexes. Overexpression of MTA2 into T47D human breast cancer cells (MTA2.5 and 2.8 clones) increases the growth in soft agar in the absence of estrogen (C). These cells were unresponsive to either estrogen-stimulation (E2), or to the growth inhibitory effects of tamoxifen (Tam), compared to vector alone transfected cells (V1 and V2).

[0227] FIG. 15 demonstrates decreased expression of EBP50 in MTA2 overexpressing T47D cells. The MTA2 expression vector was tagged with a Flag epitope. Immunoblot analysis of two vector controls (V1 and V2) and two MTA2 transfected clones demonstrated that MTA2 was indeed overexpressed and that estrogen (E) and tamoxifen (T) treatments did not affect its levels. As expected, levels of ERα protein were decreased by estrogen. EBP50 levels were increased by estrogen. Concomitant with MTA2 overexpression, EBP50 levels were decreased. Thus, EBP50 levels were reduced in TR cells. However these results are only correlative, and one can examine whether EBP50 is directly involved in resistance using siRNA technologies, for example.

[0228] FIGS. 16A and 16B demonstrate that EBP50 binds to HER2. MCF-7 breast cancer cells were treated with estrogen (E), tamoxifen (T), or E+T for 24 hours, and levels of ezrin and EBP50 were examined using immunoblot analysis (Panel A). Both ezrin and EBP50 levels were similarly induced by estrogen. In Panel B, immunoprecipitation of E or T treated MCF-7 cells was performed followed by immunoblot analysis. These results demonstrate that EBP50 and HER-2 interact in the absence and presence of E or T.

[0229] FIGS. 17A and 17B show that EBP50 overexpression enhances ERα activity. Transient transactivation assays with an ERE-luciferase reporter were utilized in U20S cells expressing exogenous ER (Panel A), or MCF-7 cells expressing endogenous ER (Panel B). ER activity was enhanced with EBP50 expression in the presence of estrogen. Tamoxifen was an antagonist and reversed estrogen's effects.

[0230] FIG. 18 shows an exemplary model for the role of EBP50. In exemplary embodiments of the invention, a reduction in EBP50 levels leads to an increase in HER-2 receptor levels, influences downstream signaling pathways, and/or affects cytoskeletal architecture. In the exemplary model, EBP50 is a negative regulator that is lost during acquired tamoxifen resistance.

[0231] Thus, lower levels of EBP50 were associated with resistance to the antiestrogen tamoxifen in tamoxifen-resistant breast tumor recurrences, and plays a role in a novel model of resistance generated by overexpression of MTA2 in T47D cells, in specific embodiments of the invention. This indicates that cytoskeleton reorganization, such as through EBP50 modulation, for example, may be involved in resistance. The inventors also found that EBP50 and HER-2 interact in MCF-7 breast cancer cells, and in specific embodiments of the invention EBP50 levels regulate HER2 receptor signaling, such as due to alterations in receptor levels, or receptor internalization and recycling, similar to that demonstrated for EBP50 regulation of G protein-coupled receptors.

### Example 7

### RHOA Inhibitor, RHOGDIA, is a Substrate for CBP/P300 Histone Acetyl Transferase Activity

[0232] In response to both cellular and extracellular signals, estrogen receptor (ER) regulates gene expression with cellular functions through its crosstalking with coregulators. It has been shown that an inhibitor of guanine nucleotide exchange and activativation of RhoGTPases, RhoGDI, is a modulator of ER function with its mechanism remaining unclear. In particular, RhoGDI is an inhibitor of the Rho A family of GTPases, and the expression and activation of RhoA is associated with breast cancer progression (Fritz et al., 1999; Fritz et al., 2002). RhoGDI's effect on ER transcriptional activity is dependent on ER-regulatory proteins (co-activators).

[0233] The inventors demonstrate that RhoGDI is associated with ERα in breast cancer cells through indirect interaction(s), because in vitro binding was not observed between ERα and RhoGDI; overexpression of RhoGDI inhibits wild-type ERα ligand sensitivity in both Hela and MCF-7 cells. Thus, in specific embodiments RhoGDI modulates ERα activity through interaction with other ERα cofactors. To further characterize this, the inventors demonstrated that RhoGDI is a substrate for p300 histone acetyl transferase (HAT) activity. They also demonstrated that their in vivo association can be blocked by Tamoxifen, which modulates the association of ERα with cofactors. Finally, overexpression of RhoGDI dramatically inhibited the in vivo acetylation of ERα. Taken together, these findings indicate that RhoGDI is a substrate of p300/CBP family members and represses ERα ligand sensitivity through competing p300 HAT activity.

[0234] Thus, in one embodiment of the present invention, the inventors investigated whether RhoGDI affects ERα activity. FIG. 19 shows that RhoGDI represses exogenous ERα activity in Hela cells. HeLa cells were transiently transfected with an ERα expression vector only, or in combination with a RhoGDI expression vector. ERα activity was measured with the cotransfected ERE-tk-Luc reporter, and transfection efficiency were normalized to co-transfected β-Gal activity. Expression of RhoGDI reduced ER activity. FIG. 20 shows that RhoGDI represses endogenous ERα activity in exemplary MCF-7 breast cancer cells.

[0235] The inventors also characterized the mechanism underlying RhoGDI's repression of ERα activity. FIG. 21 shows that RhoGDI decreases the acetylation of ERα level in vivo. HeLa cells were transiently transfected with either ERα alone, or in combination with RhoGDI. The cell lysates were immunoprecipitated (IP) with anti-acetylated lysine antibody, and the precipitates were then immunoblotted (IB) with an ERα antibody. Levels of acetylated ERα were reduced with RhoGDI expression. FIG. 22 shows that RhoGDIα is an in vitro substrate of p300 HAT activity. An in vitro acetylation assay was performed using purified GST-p300 HAT with either purified GST (negative control), or purified GST-RhoGDI in the presence of 14C-Actyl-CoA. The reactions were separated by SDS-PAGE, and visualized with autoradiography of the transferred ¹⁴C-Actyl. RhoGDI, like ERα, is acetylated by p300.

[0236] FIG. 23 shows that RhoGDI exhibits no intrinsic HAT activity. In vitro acetylation experiment was performed using GST-RhoGDI in combination with purified GST-p300HAT in the presence of ¹⁴C-Acetyl-CoA. The reactions were resolved onto SDS-PAGE and visualized with autoradiography of the transferred ¹⁴C-Actyl. The result indicates that RhoGDI itself has no intrinsic HAT activity. FIG. 24 shows that RhoGDI is acetylated in vivo. Cell lysates of MCF-7 cells grown in the presence or absence of serum were immunoprecipitated (IP) with anti-acetylated lysine antibody, and the precipitates were then immunoblotted (IB) with antibodies against either AIB1 or RhoGDI. The result indicates that RhoGDI is an acetylated protein in vivo.

[0237] FIG. 25 demonstrates that the N-terminal region of RhoGDI comprises acetylation site(s). In vitro acetylation experiment was performed using GST-RhoGDI or GST-RhoGDI (aa:1-81) in combination with purified GST-p300HAT in the presence of ¹⁴C-Acetyl-CoA. The reactions were resolved onto SDS-PAGE and visualized with autoradiography of the transferred ¹⁴C-Actyl. The result indicates that N-terminal of RhoGDI contains acetylation site(s).

[0238] FIG. 26 shows that RhoGDI decreases ERα access to p300 HAT. GST-pull down experiment was performed to examine the effect of RhoGDI on the access of ER to p300 HAT. GSH-agarose immobilized p300HAT were incubated with in vitro translated, ³⁵S-incorporated ER in the presence of increasing amount of in vitro translated RhoGDI. The result indicates that RhoGDI decreases ER access to p300HAT.

[0239] FIG. 27 demonstrates that RhoGDI inhibits p300 acetylation of ERα in vitro. Competitive in vitro acetylation assay was performed to examine the effect of RhoGDI on p300 acetylation of ER. Purified GST-ER was acetylated by GST-p300HAT in the presence of increasing amount of GST-RhoGDI. The result indicates that RhoGDI will compete p300HAT activity with ER.

[0240] FIG. 28 illustrates that RhoGDI is associated with ER in vivo. Cell lysates of MCF-7 cells treated with or without E2 or tamoxifen serum were immunoprecipitated (IP) with anti-ER antibody, and the precipitates were then immunoblotted (IB) with antibodies against TIF2 or RhoGDI. The result indicates that association of RhoGDI with ER is disrupted in the presence of Tamoxifen.

[0241] FIG. 29 shows that RhoGDI does not bind to ER directly. GST-pull down experiment was performed to examine the direct interaction between ER and RhoGDI with or without treatment of E2 or Tamoxifen. GSH-agarose immobilized p300HAT were incubated with in vitro translated, ³⁵S-incorporated ER in the presence of increasing amount of in vitro translated ER in the presence of E2 or Tam. The result indicates that RhoGDI does not interact with ER directly.

[0242] FIG. 30 illustrates an exemplary model for a role of RhoGDI associated with ER. In conclusion, RhoGDI is a substrate of p300 in vitro, and acetylated in vivo RhoGDI represses ER activity through competition of p300 HAT activity; this mechanism affords resistance to tamoxifen, in specific embodiments of the invention.

[0243] FIGS. 31A and 31B shows that RhoGDI confers resistance to tamoxifen. In the patients, Rho GDI was lower in TR, so the inventors used an siRNA directed to RhoGDI to demonstrate enhanced growth in soft agar in the presence of tamoxifen. This is analogous to the study utilizing overexpression of mkp3 in Example 2.

### Example 8

### Targeting Polynucleotides of the Present Invention

[0244] In particular aspects of the invention, one or more of the polynucleotides of the present invention are targeted, such as for cancer therapy. In specific embodiments, polynucleotides that are overexpressed may be targeted with siRNA, for example, and in additional specific embodiments polynucleotides that are underexpressed may be targeted with gene replacement. In either embodiment, exemplary polynucleotides of Table 3 and the sequences provided herein are employed to obtain the respective siRNA or gene replacement agents, for example.

TABLE 3
Exemplary Targeted Therapy for Polynucleotides of the Invention

| Gene | Exemplary Targeted therapy | Exemplary Targeted |
|---|---|---|
| Symbol | (published) | Therapy |
| FOS | antisense oligonucleotide, siRNA | siRNA |
| TCEAL1 | | siRNA |
| HIST1H4C | histone deacetylase inhibitor | |
| PRKAR2B | antisense oligonucleotide | active site inhibitor |
| DUSP6 | | phosphatase inhibitor |
| MXI1 | | siRNA |
| ANXA3 | | antibody, siRNA |
| AR | antiandrogens | |
| TGFB1I4 | | siRNA |
| MXI1 | | siRNA |
| IER3 | | siRNA |
| ESD | | siRNA |
| NR1D2 | | ligand antagonist |
| SOX9 | retinoic acid agonists, | |
| | proteasomal agents | |
| BCL2 | antisense oligonucleotide | |
| ARID5B | | siRNA |
| PRKRIR | | active site inhibitor |
| ZNF292 | | siRNA |
| IER2 | | siRNA |
| CD164 | antibodies | |
| DICER1 | shRNA and siRNA | |
| BTG1 | | siRNA |
| EEF1B2 | | siRNA |
| ATP2B1 | | siRNA |
| KPNB3 | | siRNA |
| RBPMS | | siRNA |
| DICER1 | | siRNA |
| BLNK | pharmacologic | |
| CDKN1B | | siRNA |
| BANF1 | | siRNA |
| TOPORS | | proteasome inhibitors |
| CCDC6 | | siRNA |
| RBMX | | siRNA |
| KIAA1354 | | siRNA |
| TLK1 | | siRNA |
| PNRC1 | | siRNA |
| ERCC4 | | siRNA |
| C14orf11 | | siRNA |
| FMR1 | | siRNA |
| SFRS3 | | siRNA |
| RPL36AL | | siRNA |
| NDUFA7 | | siRNA |
| MGC39325 | | siRNA |
| SHOC2 | | siRNA |
| TOP2B | | siRNA |
| DUT | | siRNA |
| MGC9084 | | siRNA |
| KIAA0261 | | siRNA |
| JWA | | siRNA |
| C18orf1 | | siRNA |
| KIAA0240 | | siRNA |
| CD2AP | | siRNA |
| RASSF3 | | siRNA |
| GYPC | | siRNA |
| SFRS12 | | siRNA |
| CDS2 | siRNA | |
| SP3 | | siRNA |
| MTMR3 | | phosphatase inhibitor |
| KIAA0423 | | siRNA |
| FBXO21 | | siRNA |
| KIAA0947 | | siRNA |
| TCF12 | | siRNA |
| FIBP | | siRNA |
| CSF1 | polysaccharide Krestin upregulates | |
| ST14 | antisense oligonucleotide | |
| HYOU1 | | GR (gene replacement) |
| CASP7 | | GR |
| CHPF | | Cox 2 inhibitor |
| PHLDA2 | | GR |
| ABCC5 | | GR |
| RRBP1 | | GR |
| EIF3S2 | | GR |
| PPIA | | GR |
| BTN3A2 | | GR |
| C19orf10 | | GR |
| PFKL | | GR |
| ARHGDIA | | GR |
| EVER1 | | antibody |
| IDH2 | | GR |
| MSF | | GR |
| SIAT4A | | GR |
| PKM2 | | GR |
| HSPA5 | | GR |
| SYNGR2 | | GR |
| PITX1 | | GR |
| GAGE2 | | GR |
| HLA-C | | GR |
| PYCR1 | | GR |
| STAT3 | g quartet oligo | |
| SLC9A3R1 | antiestrogen | |
| (also referred | | |
| to as EBP50) | | |
| SECTM1 | | antibody |
| CA12 | | antibody |
| EEF1A2 | | GR |
| IGFBP4 | | GR |
| IGFBP4 | | GR |
| APOD | | GR |

### REFERENCES

[0245] All patents and publications mentioned in the specification are indicative of the level of those skilled in the art to which the invention pertains. All patents and publications are herein incorporated by reference to the same extent as if each individual publication was specifically and individually indicated to be incorporated by reference.

### Patents and Patent Applications

[0246] U.S. Patent Application Publication Number US 2003/0198972
[0247] U.S. Patent Application Publication Number US 2003/0236632
[0248] U.S. Patent Application Publication Number US 2003/0224374
[0249] U.S. Patent Application Publication Number US 2003/0186248
[0250] U.S. Patent Application Publication Number US 2004/0002067
[0251] U.S. Patent Application Publication Number US 2004/0058340
[0252] PCT Patent Application WO 02/103320
[0253] PCT Patent Application WO 03/060164
[0254] PCT Patent Application WO 03/060470

### Publications

[0255] Adeyinka A, Emberley E, Niu Y, Snell L, Murphy L C, Sowter H, et al. Analysis of gene expression in ductal carcinoma in situ of the breast. Clin Cancer Res 2002;8:3788-95.
[0256] Altman D G, Lausen B, Sauerbrei W, Schumacher M. Dangers of using “optimal” cutpoints in the evaluation of prognostic factors. J Natl Cancer Inst 1994;86:829-35.
[0257] Alwine J C, Kemp D J, Stark G R. Method for detection of specific RNAs in agarose gels by transfer to diazobenzyloxymethyl-paper and hybridization with DNA probes. Proc. Natl. Academy Science USA 1977;74:5350-4.
[0258] Ambroise C, McLachlan G J. Selection bias in gene extraction on the basis of microarray gene-expression data. Proc Natl Acad Sci USA 2002;99:6562-6.
[0259] Andersen C L, Monni O, Wagner U, Kononen J, Barlund M, Bucher C, et al. High-throughput copy number analysis of 17q23 in 3520 tissue specimens by fluorescence in situ hybridization to tissue microarrays. Am J Pathol 2002;161:73-9.
[0260] Anzick, S. L., Kononen, J., Walker, R. L., Azorsa, D. O., Tanner, M. M., Guan, X. Y., Sauter, G., Kallioniemi, O. P., Trent, J. M., and Meltzer, P. S. AIB1, a steroid receptor coactivator amplified in breast and ovarian cancer. Science, 277: 965-968, 1997.
[0261] Aoyagi K, Tatsuta T, Nishigaki M, Akimoto S, Tanabe C, Omoto Y, et al. A faithful method for PCR-mediated global mRNA amplification and its integration into microarray analysis on laser-captured cells. Biochem Biophys Res Commun 2003;300:915-20.
[0262] Atanaskova, N., V. G. Keshamouni, et al. (2002). “MAP kinase/estrogen receptor cross-talk enhances estrogen-mediated signaling and tumor growth but does not confer tamoxifen resistance.” Oncogene 21(25): 4000-8.
[0263] Balasenthil, S., Barnes, C. J., Rayala, S. K., and Kumar, R. Estrogen receptor activation at serine 305 is sufficient to upregulate cyclin D1 in breast cancer cells. FEBS Lett, 567: 243-247, 2004.
[0264] Bardou, V. J., Arpino, G., Elledge, R. M., Osborne, C. K., and Clark, G. M. Progesterone receptor status significantly improves outcome prediction over estrogen receptor status alone for adjuvant endocrine therapy in two large breast cancer databases. J Clin Oncol, 21: 1973-1979, 2003.
[0265] Bardou, V. J., G. Arpino, et al. (2003). “Progesterone receptor status significantly improves outcome prediction over estrogen receptor status alone for adjuvant endocrine therapy in two large breast cancer databases.” J Clin Oncol 21(10): 1973-9.
[0266] Baum M, Budzar A U, Cuzick J, Forbes J, Houghton J H, Klijn J G, et al. Anastrozole alone or in combination with tamoxifen versus tamoxifen alone for adjuvant treatment of postmenopausal women with early breast cancer: first results of the ATAC randomised trial. Lancet 2002;359:2131-9.
[0267] Baum, M., Budzar, A. U., Cuzick, J., Forbes, J., Houghton, J. H., Klijn, J. G., and Sahmoud, T. Anastrozole alone or in combination with tamoxifen versus tamoxifen alone for adjuvant treatment of postmenopausal women with early breast cancer: first results of the ATAC randomised trial. Lancet, 359: 2131-2139, 2002.
[0268] Bautista, S., H. Valles, et al. (1998). “In breast cancer, amplification of the steroid receptor coactivator gene AIB1 is correlated with estrogen and progesterone receptor positivity.” Clin Cancer Res 4(12): 2925-9.
[0269] Beatson, G. T. (1896). “On the treatment of inoperable cases of carcinogen of the mamma: suggestions for a new method of treatment with illustrative cases.” Lancet 2: 104-107, 162-167.
[0270] Benz C C, Scott G K, Sarup J C, Johnson R M, Tripathy D, Coronado E, et al. Estrogen-dependant, tamoxifen-resistant tumorigenic growth of MCF-7 cells transfected with HER2/neu. Breast Cancer Research and Treatment 1993;24:85-95.
[0271] Benz, C. C., G. K. Scott, et al. (1993). “Estrogen-dependant, tamoxifen-resistant tumorigenic growth of MCF-7 cells transfected with HER2/neu.” Breast Cancer Research and Treatment 24: 85-95.
[0272] Benz, C. C., Scott, G. K., Sarup, J. C., Johnson, R. M., Tripathy, D., Coronado, E., Shepard, H. M., and Osborne, C. K. Estrogen-dependant, tamoxifen-resistant tumorigenic growth of MCF-7 cells transfected with HER2/neu. Breast Cancer Research and Treatment, 24: 85-95, 1993.
[0273] Berk A J, Sharp P A. Sizing and mapping of early adenovirus mRNAs by gel electrophoresis of S1 endonuclease-digested hybrids. Cell 1977;12:721-32.
[0274] Bloom H, Richardson W, Harrier E. Natural history of untreated breast cancer (1805-1933). Brit Medical J 1962;2:213.
[0275] Bocquel, M. T., V. Kumar, et al. (1989). “The contribution of the N- and C-terminal regions of steroid receptors to activation of transcription is both receptor and cell-specific.” Nucleic Acids Research 17: 2581-2595.
[0276] Borg A, Ferno M, Peterson C. Predicting the future of breast cancer. Nat Med 2003;9:16-8.
[0277] Brondello, J. M., Pouyssegur, J., and McKenzie, F. R. Reduced MAP kinase phosphatase-1 degradation after p42/p44MAPK-dependent phosphorylation. Science, 286: 2514-2517, 1999.
[0278] Brzozowski, A., A. C. W. Pike, et al. (1997). “Molecular basis of agonism and antagonism in the oestrogen receptor.” Nature 389: 753-758.
[0279] Buchholz T A, Stivers D N, Stec J, Ayers M, Clark E, Bolt A, et al. Global gene expression changes during neoadjuvant chemotherapy for human breast cancer. Cancer J 2002;8:461-8.
[0280] Bunone, G., Briand, P. A., Miksicek, R. J., and Picard, D. Activation of the unliganded estrogen receptor by EGF involves the MAP kinase pathway and direct phosphorylation. Embo J, 15: 2174-2183, 1996.
[0281] Buzdar, A., J. Douma, et al. (2001). “Phase III, multicenter, double-blind, randomized study of letrozole, an aromatase inhibitor, for advanced breast cancer versus megestrol acetate.” J Clin Oncol 19(14): 3357-66.
[0282] Campbell, R. A., P. Bhat-Nakshatri, et al. (2001). “Phosphatidylinositol 3-kinase/AKT-mediated activation of estrogen receptor alpha: A new model for anti-estrogen resistance.” J Biol Chem 276: 9817-24.
[0283] Camps M, Nichols A, Arkinstall S. Dual specificity phosphatases: a gene family for control of MAP kinase function. Faseb J 2000;14:6-16.
[0284] Camps M, Nichols A, Gillieron C, Antonsson B, Muda M, Chabert C, et al. Catalytic activation of the phosphatase MKP-3 by ERK2 mitogen-activated protein kinase. Science 1998;280:1262-5.
[0285] Camps, M., Chabert, C., Muda, M., Boschert, U., Gillieron, C., and Arkinstall, S. Induction of the mitogen-activated protein kinase phosphatase MKP3 by nerve growth factor in differentiating PC12. FEBS Lett, 425: 271-276, 1998.
[0286] Camps, M., Nichols, A., and Arkinstall, S. Dual specificity phosphatases: a gene family for control of MAP kinase function. Faseb J, 14: 6-16, 2000.
[0287] Camps, M., Nichols, A., Gillieron, C., Antonsson, B., Muda, M., Chabert, C., Boschert, U., and Arkinstall, S. Catalytic activation of the phosphatase MKP-3 by ERK2 mitogen-activated protein kinase. Science, 280: 1262-1265, 1998.
[0288] Carlson, R. W. and I. C. Henderson (2003). “Sequential hormonal therapy for metastatic breast cancer after adjuvant tamoxifen or anastrozole.” Breast Cancer Res Treat 80 Suppl 1: S19-26; discussion S27-8.
[0289] Carter C, Allen C, Henson D. Relation of tumor size, lymph node status, and survival in 24,740 breast cancer cases. Cancer 1989;63:181.
[0290] Castoria, G., M. V. Barone, et al. (1999). “Non-transcriptional action of oestradiol and progestin triggers DNA synthesis.” Embo J 18(9): 2500-10.
[0291] Chang J, Powles T J, Allred D C. Biologic markers as predictors of clinical outcome from systematic therapy for primary operable breast cancer. Journal of Clinical Onocolgy 2000;18:1601-2.
[0292] Chang J, Wooten E C, Elledge R M, Hilsenbeck S, Tsimelzon A, Mohsin S, et al. Gene expression profiles for docetaxel chemosensitivity. Proc Am Society Clin Oncol 2002;21:426a.
[0293] Chang, J. C., Hilsenbeck, S. G., and Fuqua, S. A. Genomic approaches in the management and treatment of breast cancer. Br J Cancer, 92: 618-624, 2005.
[0294] Chen, D., T. Riedl, et al. (2000). “Activation of estrogen receptor alpha by S118 phosphorylation involves a ligand-dependent interaction with TFIIH and participation of CDK7.” Mol Cell 6:127-37.
[0295] Cho, H. and B. S. Katzenellenbogen (1993). “Synergistic activation of estrogen receptor-mediated transcription by estradiol and protein kinase activators.” Molecular Endocrinology 7(3): 441-452.
[0296] Chrenek M A, Wong P, Weaver V M. Tumour-stromal interactions: Integrins and cell adhesions as modulators of mammary cell survival and transformation. Breast Cancer Res 2001;3:224-9.
[0297] Clark G M. Prognostic and Predictive Factors. In Harris J R, Lippman M E, Morrow M, Osborne C K, editors. Diseases of the Breast. Vol 2. Philadelphia: Lippincott Williams & Wilkins; 2000.
[0298] Clark, G. M. and W. L. McGuire (1988). “Steroid receptors and other prognostic factors in primary breast cancer.” Seminars in Oncology 15(2 Suppl 1 (April)): 20-25.
[0299] Clark, G. M., W. L. McGuire, et al. (1983). “The importance of estrogen and progesterone receptor in primary breast cancer.” Prog Clin Biol Res 132E: 183-90.
[0300] Cooper C S. Applications of microarray technology in breast cancer research. Breast Cancer Res 2001;3:158-75.
[0301] Coser, K. R., J. Chesnes, et al. (2003). “Global analysis of ligand sensitivity of estrogen inducible and suppressible genes in MCF7/BUS breast cancer cells by DNA microarray.” Proc Natl Acad Sci USA 100(24): 13994-9.
[0302] Cui, X., Zhang, P., Deng, W., Oesterreich, S., Lu, Y., Mills, G. B., and Lee, A. V. Insulin-like growth factor-I inhibits progesterone receptor expression in breast cancer cells via the phosphatidylinositol 3-kinase/Akt/mammalian target of rapamycin pathway: progesterone receptor as a potential indicator of growth factor activity in breast cancer. Mol Endocrinol, 17: 575-588, 2003.
[0303] Cui, Y., Zhang, M., Pestell, R., Curran, E. M., Welshons, W. V., and Fuqua, S. A. W. Phosphorylation of estrogen receptor a blocks its acetylation and regulates estrogen sensitivity. Cancer Research, 64: 9199-9208, 2004.
[0304] Daidone, M. G., A. Luisi, et al. (1999). “Clinical studies of Bcl-2 and treatment benefit in breast cancer patients.” Endocr Relat Cancer 6(1): 61-8.
[0305] Deapen, D., L. Liu, et al. (2002). “Rapidly rising breast cancer incidence rates among Asian-American women.” Int J Cancer 99(5): 747-50.
[0306] Doisneau-Sixou, S. F., Sergio, C. M., Carroll, J. S., Hui, R., Musgrove, E. A., and Sutherland, R. L. Estrogen and antiestrogen regulation of cell cycle progression in breast cancer cells. Endocr Relat Cancer, 10: 179-186, 2003.
[0307] Dowsett, M. (2003). “Analysis of time to recurrence in the ATAC (armidex, tamoxifen, alone or in combination) trial according to estrogen receptor and progesterone receptor status.” Breast Cancer Research and Treatment 82 (S1): S10.
[0308] Dowsett, M. Analysis of time to recurrence in the ATAC (armidex, tamoxifen, alone or in combination) trial according to estrogen receptor and progesterone receptor status. Breast Cancer Research and Treatment, 82 (S1): S10, 2003.
[0309] Dressman M A, Walz T M, Lavedan C, Barnes L, Buchholtz S, Kwon I, et al. Genes that co-cluster with estrogen receptor alpha in microarray analysis of breast biopsies. Pharmacogenomics J 2001;1:135-41.
[0310] Driggers, P. H. and J. H. Segars (2002). “Estrogen action and cytoplasmic signaling pathways. Part II: the role of growth factors and phosphorylation in estrogen signaling.” Trends Endocrinol Metab 13(10): 422-7.
[0311] Dudoit S, Fridlyand J. A prediction-based resampling method for estimating the number of clusters in a dataset. Genome Biol 2002;3:RESEARCH0036.
[0312] Early_Breast_Cancer_Trialists'_Collaborative_Group (1998). “Tamoxifen for early breast cancer: an overview of the randomised trials.” Lancet 351: 1451-1467.
[0313] Early_Breast_Cancer_Trialists'_Collaborative_Group Tamoxifen for early breast cancer: an overview of the randomised trials. Lancet, 351: 1451-1467, 1998.
[0314] Early_Breast_Cancer_Trialists_Collaborative_Group. Polychemotherapy for early breast cancer: an overview of the randomised trials. Early Breast Cancer Trialists' Collaborative Group. Lancet 1998;352:930-42.
[0315] Early_Breast_Cancer_Trialists_Collaborative_Group. Systemic treatment of early breast cancer by hormonal, cytotoxic, or immune therapy. 133 randomised trials involving 31,000 recurrences and 24,000 deaths among 75,000 women. Early Breast Cancer Trialists' Collaborative Group. Lancet 1992;339:1-15, 71-85.
[0316] Early_Breast_Cancer_Trialists'_Collaborative_Group. Tamoxifen for early breast cancer: an overview of the randomised trials. Lancet 1998;351:1451-67.
[0317] Elledge R M, Fuqua S A W. Estrogen and Progesterone Receptors. In Harris J R, Lippman M E, Morrow M, Osborne C K, editors. Diseases of the Breast. Vol 2. Philadelphia, Pa.: Lippincott, Williams & Wilkins; 2000. p. 471-88.
[0318] Ellis M, Davis N, Coop A, Liu M, Schumaker L, Lee R Y, et al. Development and validation of a method for using breast core needle biopsies for gene expression microarray analyses. Clin Cancer Res 2002;8:1155-66.
[0319] Encarnacion C A, Ciocca D R, McGuire W L, Clark G M, Fuqua S A, Osborne C K. Measurement of steroid hormone receptors in breast cancer patients on tamoxifen. Breast Cancer Research & Treatment 1993;26:237-46.
[0320] Encarnacion, C. A., Ciocca, D. R., McGuire, W. L., Clark, G. M., Fuqua, S. A., and Osborne, C. K. Measurement of steroid hormone receptors in breast cancer patients on tamoxifen. Breast Cancer Research & Treatment, 26: 237-246, 1993.
[0321] Encarnacion, C. A., D. R. Ciocca, et al. (1993). “Measurement of steroid hormone receptors in breast cancer patients on tamoxifen.” Breast Cancer Research & Treatment 26(3): 237-46.
[0322] Faridi J, Wang L, Endemann G, Roth R A. Expression of constitutively active Akt-3 in MCF-7 breast cancer cells reverses the estrogen and tamoxifen responsivity of these cells in vivo. Clin Cancer Res 2003;9:2933-9.
[0323] Faridi, J., Wang, L., Endemann, G., and Roth, R. A. Expression of constitutively active Akt-3 in MCF-7 breast cancer cells reverses the estrogen and tamoxifen responsivity of these cells in vivo. Clin Cancer Res, 9: 2933-2939, 2003.
[0324] Felekkis, K. N., Narsimhan, R. P., Near, R., Castro, A. F., Zheng, Y., Quilliam, L. A., and Lerner, A. AND-34 activates phosphatidylinositol 3-kinase and induces anti-estrogen resistance in a SH2 and GDP exchange factor-like domain-dependent manner. Mol Cancer Res, 3: 32-41, 2005.
[0325] Fisher B, Bryant J, Wolmark N, Mamounas E, Brown A, Fisher E R, et al. Effect of preoperative chemotherapy on the outcome of women with operable breast cancer. J Clin Oncol 1998;16:2672-85.
[0326] Fisher B, Dignam J, Wolmark N, DeCillis A, Emir B, Wickerham D L, et al. Tamoxifen and chemotherapy for lymph node-negative, estrogen receptor-positive breast cancer. J Natl Cancer Inst 1997;89:1673-82.
[0327] Fisher E R, Palekar A, Rockette H, al. e. Pathologic findings from the National Surgical Adjuvant Breast Project (Protocol No. 4). V. Significance of axillary nodal micro- and macrometastasis. Cancer 1978;42:2032-8.
[0328] Fisher E R, Redmond C, Fisher B. Histologic grading of breast cancer. Pathol Ann 1980;15:239-51.
[0329] Fisher, B. J., F. E. Perera, et al. (1998). “Long-term follow-up of axillary node-positive breast cancer patients receiving adjuvant tamoxifen alone: patterns of recurrence.” Int J Radiat Oncol Biol Phys 42(1): 117-23.
[0330] Fujimoto, N. and B. S. Katzenellenbogen (1994). “Alteration in the agonist/antagonist balance of antiestrogens by activation of protein kinase A signaling pathways in breast cancer cells: Antiestrogen selectivity and promoter dependence.” Molecular Endocrinology 8: 296-304.
[0331] Fujita, T., Y. Kobayashi, et al. (2003). “Full activation of estrogen receptor alpha activation function-1 induces proliferation of breast cancer cells.” J Biol Chem 278(29): 26704-14.
[0332] Fuqua S A W, Wiltschke C, Zhang Q X, Borg A, Castles C G, Friedrichs W E, et al. A hypersensitive estrogen receptor-α mutation in premalignant breast lesions. Cancer Research 2000;60:4026-9.
[0333] Fuqua S A W. The role of estrogen receptors in breast cancer metastasis. J Mam Gland Bio Neoplasia 2002;6:407-17.
[0334] Fuqua, S. A. W. (1994). “Estrogen receptor mutagenesis and hormone resistance.” Cancer 74(3 Suppl.): 1026-1029.
[0335] Fuqua, S. A. W. (2002). “The role of estrogen receptors in breast cancer metastasis.” J Mam Gland Bio Neoplasia 6: 407-417.
[0336] Fuqua, S. A. W., C. Wiltschke, et al. (2000). “A hypersensitive estrogen receptor-a mutation in premalignant breast lesions.” Cancer Research 60(15): 4026-4029.
[0337] Fuqua, S. A. W., Wiltschke, C., Zhang, Q. X., Borg, A., Castles, C. G., Friedrichs, W. E., Hopp, T., Hilsenbeck, S., Mohsin, S., O'Connell, P., and Allred, D. C. A hypersensitive estrogen receptor-a mutation in premalignant breast lesions. Cancer Research, 60: 4026-4029, 2000.
[0338] Fuqua, S. A., R. Schiff, et al. (2003). “Estrogen receptor beta protein in human breast cancer: correlation with clinical tumor parameters.” Cancer Res 63(10): 2434-9.
[0339] Furukawa T, Sunamura M, Motoi F, Matsuno S, Horii A. Potential tumor suppressive pathway involving DUSP6/MKP-3 in pancreatic cancer. Am J Pathol 2003;162:1807-15.
[0340] Furukawa, T., Sunamura, M., Motoi, F., Matsuno, S., and Horii, A. Potential tumor suppressive pathway involving DUSP6/MKP-3 in pancreatic cancer. Am J Pathol, 162: 1807-1815, 2003.
[0341] Gee J M, Robertson J F, Ellis I O, Nicholson R1. Phosphorylation of ERK1/2 mitogen-activated protein kinase is associated with poor response to antihormonal therapy and decreased patient survival in clinical breast cancer. Int J Cancer 2001;95:247-54.
[0342] Gee, J. M., J. F. Robertson, et al. (2001). “Phosphorylation of ERK1/2 mitogen-activated protein kinase is associated with poor response to anti-hormonal therapy and decreased patient survival in clinical breast cancer.” Int J Cancer 95(4): 247-54.
[0343] Gee, J. M., Robertson, J. F., Ellis, I. O., and Nicholson, R. I. Phosphorylation of ERK1/2 mitogen-activated protein kinase is associated with poor response to anti-hormonal therapy and decreased patient survival in clinical breast cancer. Int J Cancer, 95: 247-254, 2001.
[0344] Gelbfish, G. A., A. L. Davidson, et al. (1988). “Relationship of estrogen and progesterone receptors to prognosis in breast cancer.” Ann Surg 207(1): 75-9.
[0345] Ginestier C, Charafe-Jauffret E, Bertucci F, Eisinger F, Geneix J, Bechlian D, et al. Distinct and complementary information provided by use of tissue and DNA microarrays in the study of breast tumor markers. Am J Pathol 2002;161:1223-33.
[0346] Girault, I., F. Lerebours, et al. (2003). “Expression analysis of estrogen receptor alpha coregulators in breast carcinoma: evidence that NCOR1 expression is predictive of the response to tamoxifen.” Clin Cancer Res 9(4): 1259-66.
[0347] Gompel, A., S. Somai, et al. (2000). “Hormonal regulation of apoptosis in breast cells and tissues.” Steroids 65(10-11): 593-8.
[0348] Grammer, T. C. and Blenis, J. Evidence for MEK-independent pathways regulating the prolonged activation of the ERK-MAP kinases. Oncogene, 14: 1635-1642, 1997.
[0349] Gruvberger S, Ringner M, Chen Y, Panavally S, Saal L H, Borg A, et al. Estrogen receptor status in breast cancer is associated with remarkably distinct gene expression patterns. Cancer Research 2001;61:5979-84.
[0350] Gruvberger S, Ringner M, Chen Y, Panavally S, Saal L H, Borg A, et al. Estrogen receptor status in breast cancer is associated with remarkably distinct gene expression patterns. Cancer Res 2001;61:5979-84.
[0351] Gruvberger S K, Ringner M, Eden P, Borg A, Ferno M, Peterson C, et al. Expression profiling to predict outcome in breast cancer: the influence of sample selection. Breast Cancer Res 2002;5:23-6.
[0352] Gutierrez, M. C., Detre, S., Johnston, S., Mohsin, S. K., Shou, J., Allred, D. C., Schiff, R., Osborne, C. K., and Dowsett, M. Molecular changes in tamoxifen-resistant breast cancer: relationship between estrogen receptor, HER-2, and p38 mitogen-activated protein kinase. J Clin Oncol, 23: 2469-2476, 2005.
[0353] Harris J, Hellman S. Observations on survival curve analysis with particular reference to breast cancer treatment. Cancer 1986;57:925-8.
[0354] Harvey J M. Estrogen receptor status by immunohistochemistry is superior to the ligand-binding assay for predicting response to adjuvant endocrine therapy in breast cancer. Journal of Clinical Oncology 1999;17:1474-81.
[0355] Harvey, J. M. (1999). “Estrogen receptor status by immunohistochemistry is superior to the ligand-binding assay for predicting response to adjuvant endocrine therapy in breast cancer.” Journal of Clinical Oncology 17(5): 1474-81.
[0356] Haslam S Z, Woodward T L. Tumour-stroma interactions: Reciprocal regulation of extracellular matrix proteins and ovarian steroid activity in the mammary gland. Breast Cancer Res 2001;3:365-72.
[0357] Hayashi, S. I., H. Eguchi, et al. (2003). “The expression and function of estrogen receptor alpha and beta in human breast cancer and its clinical application.” Endocr Relat Cancer 10(2): 193-202.
[0358] Hedenfalk I, Duggan D, Chen Y, Radmacher M, Bittner M, Simon R, et al. Gene-expression profiles in hereditary breast cancer. N Engl J Med 2001;344:539-48.
[0359] Hedenfalk I A, Ringner M, Trent J M, Borg A. Gene expression in inherited breast cancer. Advances in Cancer Research 2002;84:1-34.
[0360] Hilsenbeck S G, Clark G M, McGuire W L. Why do so many prognostic factors fail to pan out? Breast Cancer Res Treat 1992;22:197-206.
[0361] Hilsenbeck S G, Clark G M. Practical p-value adjustment for optimally selected cutpoints. Stat Med 1996; 15:103-12.
[0362] Hodges, L. C., J. D. Cook, et al. (2003). “Tamoxifen functions as a molecular agonist inducing cell cycle-associated genes in breast cancer cells.” Mol Cancer Res 1(4): 300-11.
[0363] Holloway, J. N., Murthy, S., and E1-Ashry, D. A cytoplasmic substrate of mitogen-activated protein kinase is responsible for estrogen receptor-alpha down-regulation in breast cancer cells: the role of nuclear factor-kappaB. Mol Endocrinol, 18: 1396-1410, 2004.
[0364] Hopp, T. A., Weiss, H. L., Hilsenbeck, S. G., Cui, Y., Allred, D. C., Horwitz, K. B., and Fuqua, S. A. Breast cancer patients with progesterone receptor PR-A-Rich tumors have poorer disease-free survival rates. Clin Cancer Res, 10: 2751-2760, 2004.
[0365] Howell, A., D. J. DeFriend, et al. (1996). “Pharrmacokinetics, pharrmacological and anti-tumour effects of the specific anti-oestrogen ICI 182780 in women with advanced breast cancer.” Br J Cancer 1996: 300-308.
[0366] Hutcheson, I. R., J. M. Knowlden, et al. (2003). “Oestrogen receptor-mediated modulation of the EGFR/MAPK pathway in tamoxifen-resistant MCF-7 cells.” Breast Cancer Res Treat 81(1): 81-93.
[0367] Iwase, H., Z. Zhang, et al. (2003). “Clinical significance of the expression of estrogen receptors alpha and beta for endocrine therapy of breast cancer.” Cancer Chemother Pharmacol 52 Suppl 1: S34-8.
[0368] Jansen, M. P., Foekens, J. A., van Staveren, I. L., Dirkzwager-Kiel, M. M., Ritstier, K., Look, M. P., Meijer-van Gelder, M. E., Sieuwerts, A. M., Portengen, H., Dorssers, L. C., Klijn, J. G., and Berns, E. M. Molecular classification of tamoxifen-resistant breast carcinomas by gene expression profiling. J Clin Oncol, 23: 732-740, 2005.
[0369] Joel, P. B., A. M. Traish, et al. (1998). “Estradiol-induced phosphorylation of serine 118 in the estrogen receptor is independent of p42/p44 mitogen-activated protein kinase.” J Biol Chem 273(21): 13317-23.
[0370] Joel, P. B., J. Smith, et al. (1998a). “pp90rsk1 regulates estrogen receptor-mediated transcription through phosphorylation of Ser-167.” Mol Cell Biol 18: 1978-84.
[0371] Joel, P. B., Traish, A. M., and Lannigan, D. A. Estradiol-induced phosphorylation of serine 118 in the estrogen receptor is independent of p42/p44 mitogen-activated protein kinase. J Biol Chem, 273: 13317-13323, 1998.
[0372] Johnston, S. R., J. Head, et al. (2003). “Integration of signal transduction inhibitors with endocrine therapy: an approach to overcoming hormone resistance in breast cancer.” Clin Cancer Res 9(1 Pt 2): 524S-32S.
[0373] Kallioniemi O P, Wagner U, Kononen J, Sauter G. Tissue microarray technology for high-throughput molecular profiling of cancer. Hum Mol Genet 2001;10:657-62.
[0374] Karnik, P. S., S. Kulkarni, et al. (1994). “Estrogen receptor mutations in tamoxifen-resistant breast cancer.” Cancer Research 54(2): 349-353.
[0375] Kato S, Endoh H, Masuhiro Y, Kitamoto T, Uchiyama S, Sasaki H, et al. Activation of the estrogen receptor through phosphorylation by mitogen-activated protein kinase. Science 1995;270:1491-4.
[0376] Kato, S., Endoh, H., Masuhiro, Y., Kitamoto, T., Uchiyama, S., Sasaki, H., Masushige, S., Gotoh, Y., Nishida, E., and Kawashima, H. Activation of the estrogen receptor through phosphorylation by mitogen-activated protein kinase. Science, 270: 1491-1494, 1995.
[0377] Kato, S., H. Endoh, et al. (1995). “Activation of the estrogen receptor through phosphorylation by mitogen-activated protein kinase.” Science 270(5241): 1491-4.
[0378] Kim H S, Song M C, Kwak I H, Park T J, Lim I K. Constitutive induction of p-Erk1/2 accompanied by reduced activities of protein phosphatases 1 and 2A and MKP3 due to reactive oxygen species during cellular senescence. J Biol Chem 2003;278:37497-510.
[0379] Kim, H. S., Song, M. C., Kwak, I. H., Park, T. J., and Lim, I. K. Constitutive induction of p-Erk1/2 accompanied by reduced activities of protein phosphatases 1 and 2A and MKP3 due to reactive oxygen species during cellular senescence. J Biol Chem, 278: 37497-37510, 2003.
[0380] Knight, W. A. I., R. B. Livingston, et al. (1977). “Estrogen receptor is an independent prognostic factor for early recurrence in breast cancer.” Cancer Research 37: 4669-4671.
[0381] Knowlden J M, Hutcheson I R, Jones H E, Madden T, Gee J M, Harper M E, et al. Elevated levels of epidermal growth factor receptor/c-erbB2 heterodimers mediate an autocrine growth regulatory pathway in tamoxifen-resistant MCF-7 cells. Endocrinology 2003;144:1032-44.
[0382] Knowiden, J. M., Hutcheson, I. R., Jones, H. E., Madden, T., Gee, J. M., Harper, M. E., Barrow, D., Wakeling, A. E., and Nicholson, R. I. Elevated levels of epidermal growth factor receptor/c-erbB2 heterodimers mediate an autocrine growth regulatory pathway in tamoxifen-resistant MCF-7 cells. Endocrinology, 144: 1032-1044, 2003.
[0383] Kononen J, Bubendorf L, Kallioniemi A, Barlund M, Schraml P, Leighton S, et al. Tissue microarrays for high-throughput molecular profiling of tumor specimens. Nat Med 1998;4:844-7.
[0384] Korsching E, Packeisen J, Agelopoulos K, Eisenacher M, Voss R, Isola J, et al. Cytogenetic alterations and cytokeratin expression patterns in breast cancer: integrating a new model of breast differentiation into cytogenetic pathways of breast carcinogenesis. Lab Invest 2002;82:1525-33.
[0385] Kraus, W. L., K. E. Weis, et al. (1995). “Inhibitory cross-talk between steroid hormone receptors: differential targeting of estrogen receptor in the repression of its transcriptional activity by agonist- and antagonist-occupied progestin receptors.” Mol Cell Biol 15(4): 1847-57.
[0386] Kuiper, G. G., E. Enmark, et al. (1996). “Cloning of a novel estrogen receptor expressed in rat prostate and ovary.” Proceeding of the National Academy of Science 93: 5925-5930.
[0387] Kumar, R., M. Mandal, et al. (1996). “Overexpression of HER2 modulates bcl-2, bcl-XL, and tamoxifen-induced apoptosis in human MCF-7 breast cancer cells.” Clin Cancer Res 2(7): 1215-9.
[0388] Kurebayashi, J., T. Otsuki, et al. (2000). “Expression levels of oestrogen receptor-alpha, estrogen receptor-beta, coactivators, and corepressors in breast cancer.” Clin Cancer Res 6: 512-8.
[0389] Kurokawa H, Lenferink A E, Simpson J F, Pisacane P I, Sliwkowski M X, Forbes J T, et al. Inhibition of HER2/neu (erB-2) and mitogen-activated protein kinase enhances tamoxifen action against HER2-overxpressing, tamoxifen-resistant breast cancer cells. Cancer Res 2000;60:5887-94.
[0390] Kurokawa, H., A. E. Lenferink, et al. (2000). “Inhibition of HER2/neu (erbB-2) and mitogen-activated protein kinases enhances tamoxifen action against HER2-overexpressing, tamoxifen-resistant breast cancer cells.” Cancer Res 60(20): 5887-94.
[0391] Kurokawa, H., Lenferink, A. E., Simpson, J. F., Pisacane, P. I., Sliwkowski, M. X., Forbes, J. T., and Arteaga, C. L. Inhibition of HER2/neu (erB-2) and mitogen-activated protein kinass enhances tamoxifen action against HER2-overxpressing, tamoxifen-resistant breast cancer cells. Cancer Res, 60: 5887-5894, 2000.
[0392] Kuukasjarvi, T., J. Kononen, et al. (1996). “Loss of estrogen receptor in recurrent breast cancer is associated with poor response to endocrine therapy.” Journal of Clinical Oncology 14: 2584.
[0393] Lamb, J., M. H. Ladha, et al. (2000). “Regulation of the functional interaction between cyclin D1 and the estrogen receptor.” Mol Cell Biol 20(23): 8667-75.
[0394] Lange, C. A., Shen, T., and Horwitz, K. B. Phosphorylation of human progesterone receptors at serine-294 by mitogen-activated protein kinase signals their degradation by the 26S proteasome. Proc Natl Acad Sci USA, 97: 1032-1037, 2000.
[0395] Larsen, S. S., Egeblad, M., Jaattela, M., and Lykkesfeldt, A. E. Acquired antiestrogen resistance in MCF-7 human breast cancer sublines is not accomplished by altered expression of receptors in the ErbB-family. Breast Cancer Res Treat, 58: 41-56, 1999.
[0396] Lavinsky, R. M., K. Jepsen, et al. (1998). “Diverse signaling pathways modulate nuclear receptor recruitment of N-CoR and SMRT complexes.” Proceedings of the National Academy of Science USA 95(6): 2920-2925.
[0397] Le Goff, P., Montano, M. M., Schodin, D. J., and Katzenellenbogen, B. S. Phosphorylation of the human estrogen receptor. Identification of hormone-regulated sites and examination of their influence on transcriptional activity. J Biol Chem, 269: 4458-4466, 1994.
[0398] Li C, Wong W H. Model-based analysis of oligonucleotide arrays: expression index computation and outlier detection. Proc Natl Acad Sci USA 2001;98:31-6.
[0399] Li, C. and Wong, W. H. Model-based analysis of oligonucleotide arrays: model validation, design issues and standard error application. Genome Biology, 2: 32.31-32.11, 2001.
[0400] Liang P, Averboukh L, Keyomarsi K, Sager R, Pardee A B. Differential display and cloning of messenger RNAs from human breast cancer versus mammary epithelial cells. Cancer Research 1992;52:6966-8.
[0401] Lin, Y. W., Chuang, S. M., and Yang, J. L. ERK1/2 achieves sustained activation by stimulating MAPK phosphatase-1 degradation via the ubiquitin-proteasome pathway. J Biol Chem, 278: 21534-21541, 2003.
[0402] Lobenhofer E K, Marks J R. Estrogen-induced mitogenesis of MCF-7 cells does not require the induction of mitogen-activated protein kinase activity. J Steroid Biochem Mol Biol 2000;75:11-20.
[0403] Lobenhofer, E. K. and Marks, J. R. Estrogen-induced mitogenesis of MCF-7 cells does not require the induction of mitogen-activated protein kinase activity. J Steroid Biochem Mol Biol, 75: 11-20, 2000.
[0404] Louie M C, Zou J X, Rabinovich A, Chen H W. ACTR/AIB1 functions as an E2F1 coactivator to promote breast cancer cell proliferation and antiestrogen resistance. Mol Cell Biol 2004;24:5157-71.
[0405] Louie, M. C., Zou, J. X., Rabinovich, A., and Chen, H. W. ACTR/AIB1 functions as an E2F1 coactivator to promote breast cancer cell proliferation and antiestrogen resistance. Mol Cell Biol, 24: 5157-5171, 2004.
[0406] Lu M, Miller K D, Gokmen-Polar Y, Jeng M H, Kinch M S. EphA2 overexpression decreases estrogen dependence and tamoxifen sensitivity. Cancer Res 2003;63:3425-9.
[0407] Lu, M., Miller, K. D., Gokmen-Polar, Y., Jeng, M. H., and Kinch, M. S. EphA2 overexpression decreases estrogen dependence and tamoxifen sensitivity. Cancer Res, 63: 3425-3429, 2003.
[0408] Ma X J, Wang Z, Ryan P D, Isakoff S J, Barmettler A, Fuller A, et al. A two-gene expression ratio predicts clinical outcome in breast cancer patients treated with tamoxifen. Cancer Cell 2004;5:607-16.
[0409] Ma, X. J., Wang, Z., Ryan, P. D., Isakoff, S. J., Barmettler, A., Fuller, A., Muir, B., Mohapatra, G., Salunga, R., Tuggle, J. T., Tran, Y., Tran, D., Tassin, A., Amon, P., Wang, W., Enright, E., Stecker, K., Estepa-Sabal, E., Smith, B., Younger, J., Balis, U., Michaelson, J., Bhan, A., Habin, K., Baer, T. M., Brugge, J., Haber, D. A., Erlander, M. G., and Sgroi, D. C. A two-gene expression ratio predicts clinical outcome in breast cancer patients treated with tamoxifen. Cancer Cell, 5: 607-616, 2004.
[0410] Mandlekar, S. and A. N. Kong (2001). “Mechanisms of tamoxifen-induced apoptosis.” Apoptosis 6(6): 469-77.
[0411] Mann, S., R. Laucirica, et al. (2001). “Estrogen receptor beta expression in invasive breast cancer.” Hum Pathol 32(1): 113-8.
[0412] Martin, M. B., T. F. Franke, et al. (2000). “A role for Akt in mediating the estrogenic functions of epidermal growth factor and insulin-like growth factor I.” Endocrinology 141(12): 4503-11.
[0413] Maskarinec, G. (2000). “Breast cancer—interaction between ethnicity and environment.” In vivo 14(1): 115-23.
[0414] Massarweh, S., J. Shou, et al. (2002). “Inhibition of Epidermal Growth Factor/HER2 Receptor Signaling Using ZD1839 (“Iressa”) Restores Tamoxifen Sensitivity and Delays Resistance to Estrogen Deprivation in HER2-Overexpressing Breast Tumors (abstract #130).” Proceeding of the American Society of Clinical Oncologists 22: 339.
[0415] McDonnell, D. P., D. L. Clemm, et al. (1995). “Analysis of estrogen receptor function in vitro reveals three distinct classes of antiestrogens.” Molecular Endocrinology 9: 659-668.
[0416] McDonnell, D. P., M. M. Shahbaz, et al. (1994). “The human progesterone receptor A-form functions as a transcriptional modulator of mineralocorticoid receptor transcriptional activity.” J Steroid Biochem Mol Biol 48(5-6): 425-32.
[0417] McGuire W L, Tandon A K, Allred D C, Chamness G C, Ravdin P M, Clark G M. Treatment decisions in axillary node-negative breast cancer patients. Journal of the National Cancer Institute. Monographs 1992:173-80.
[0418] McGuire W L. Hormone receptors: their role in predicting prognosis and response to endocrine therapy. Seminars in Oncology 1978;5:428-33.
[0419] McKenna, N. J., R. B. Lanz, et al. (1999). “Nuclear receptor coregulators: cellular and molecular biology.” Endocrine Reviews 20: 321-344.
[0420] McMahon, C. T., J. Suthiphongchai, et al. (1999). “P/CAF associates with cyclin D1 and potentiates its activation of the estrogen receptor.” Proceedings of the National Academy of Sciences of the United States of America 96: 5382-5387.
[0421] McShane LM, Radmacher M D, Freidlin B, Yu R, Li M C, Simon R. Methods for assessing reproducibility of clustering patterns observed in analyses of microarray data. Bioinformatics 2002;18:1462-9.
[0422] Michalides, R., Griekspoor, A., Balkenende, A., Verwoerd, D., Janssen, L., Jalink, K., Floore, A., Velds, A., van't Veer, L., and Neefjes, J. Tamoxifen resistance by a conformational arrest of the estrogen receptor alpha after PKA activation in breast cancer. Cancer Cell, 5: 597-605, 2004.
[0423] Migliaccio A, Di Domenico M, Castoria G, de Falco A, Bontempo P, Nola E, et al. Tyrosine kinase/p21ras/MAP-kinase pathway activation by estradiol-receptor complex in MCF-7 cells. EMBO Journal 1996;15:1292-300.
[0424] Migliaccio, A., Di Domenico, M., Castoria, G., de Falco, A., Bontempo, P., Nola, E., and Auricchio, F. Tyrosine kinase/p21ras/MAP-kinase pathway activation by estradiol-receptor complex in MCF-7 cells. EMBO Journal, 15: 1292-1300, 1996.
[0425] Misrahi, M., M. Atger, et al. (1987). “Complete amino acid sequence of the human progesterone receptor deduced from cloned cDNA.” Biochemical and Biophysical Research Communications 143(2, March 13): 740-748.
[0426] Morrison, A. J., R. E. Herrera, et al. (2003). “Dominant-negative nuclear receptor corepressor relieves transcriptional inhibition of retinoic acid receptor but does not alter the agonist/antagonist activities of the tamoxifen-bound estrogen receptor.” Mol Endocrinol 17(8): 1543-54.
[0427] Mote, P. A., J. A. Leary, et al. (2004). “Germ-line mutations in BRCA1 or BRCA2 in the normal breast are associated with altered expression of estrogen-responsive proteins and the predominance of progesterone receptor A.” Genes Chromosomes Cancer 39(3): 236-48.
[0428] Moulders S L, Yakes F M, Muthuswamy S K, Bianco R, Simpson J F, Arteaga C L. Epidermal groath factor receptor (HER1) tyrosine kinase inhibitor ZD1839 (Iressa) inhibits HER2/neu (erbB2)-overexpressing breast cancer cells in vitro and in vivo. Cancer Research 2001;61:8887-95.
[0429] Moulders, S. L., F. M. Yakes, et al. (2001). “Epidermal groath factor receptor (HER1) tyrosine kinase inhibitor ZD1839 (Iressa) inhibits HER2/neu (erbB2)-overexpressing breast cancer cells in vitro and in vivo.” Cancer Research 61: 8887-8895.
[0430] Moulders, S. L., Yakes, F. M., Muthuswamy, S. K., Bianco, R., Simpson, J. F., and Arteaga, C. L. Epidermal groath factor receptor (HER1) tyrosine kinase inhibitor ZD 1839 (Iressa) inhibits HER2/neu (erbB2)-overexpressing breast cancer cells in vitro and in vivo. Cancer Research, 61: 8887-8895, 2001.
[0431] Murphy, L. C., E. Leygue, et al. (2002). “Relationship of coregulator and oestrogen receptor isoform expression to de novo tamoxifen resistance in human breast cancer.” Br J Cancer 87(12): 1411-6.
[0432] Murphy, L. C., S. L. Simon, et al. (2000). “Altered expression of estrogen receptor coregulators during human breast tumorigenesis.” Cancer Res 60(22): 6266-71.
[0433] Murphy, L., Cherlet, T., Adeyinka, A., Niu, Y., Snell, L., and Watson, P. Phospho-serine-118 estrogen receptor-alpha detection in human breast tumors in vivo. Clin Cancer Res, 10: 1354-1359, 2004.
[0434] Nacht M, Ferguson A T, Zhang W, Petroziello J M, Cook B P, Gao Y H, et al. Combining serial analysis of gene expression and array technologies to identify genes differentially expressed in breast cancer. Cancer Res 1999;59:5464-70.
[0435] Nawaz, Z., Lonard, D. M., Dennis, A. P., Smith, C. L., and O'Malley, B. W. Proteasome-dependent degradation of the human estrogen receptor. Biochemistry, 96: 1858-1862, 1999.
[0436] Nedergaard, L., T. Haerslev, et al. (1995). “Immunohistochemical study of estrogen receptors in primary breast carcinomas and their lymph node metastases including comparison of two monoclonal antibodies.” APMIS 103(1): 20-4.
[0437] Neuman, E., M. H. Ladha, et al. (1997). “Cyclin D1 stimulation of estrogen receptor transcriptional activity independent of cdk4.” Molecular and Cellular Biology 17(9): 5338-5347.
[0438] Nichols, A., Camps, M., Gillieron, C., Chabert, C., Brunet, A., Wilsbacher, J., Cobb, M., Pouyssegur, J., Shaw, J. P., and Arkinstall, S. Substrate recognition domains within extracellular signal-regulated kinase mediate binding and catalytic activation of mitogen-activated protein kinase phosphatase-3. J Biol Chem, 275: 24613-24621, 2000.
[0439] Nicholson, R. I., J. M. Gee, et al. (2003). “The biology of antihormone failure in breast cancer.” Breast Cancer Res Treat 80 Suppl 1: S29-34; discussion S35.
[0440] O'Connell P, Pekkel V, Fuqua S, Osborne C K, Allred D C. Molecular genetic studies of early breast cancer evolution. Breast Cancer Research and Treatment 1994;32:5-12.
[0441] O'Connell P, Pekkel V, Fuqua S A W, Osborne C K, Allred D C. Analysis of loss of heterozygosity in 399 premalignant breast lesions at 15 genetic loci. Journal of the National Cancer Institute 1998;90:697-703.
[0442] Oh, A. S., Lorant, L. A., Holloway, J. N., Miller, D. L., Kern, F. G., and E1-Ashry, D. Hyperactivation of MAPK induces loss of ERalpha expression in breast cancer cells. Mol Endocrinol, 15: 1344-1359, 2001.
[0443] Omoto, Y., S. Kobayashi, et al. (2002). “Evaluation of oestrogen receptor beta wild-type and variant protein expression, and relationship with clinicopathological factors in breast cancers.” Eur J Cancer 38(3): 380-6.
[0444] Osborne C K, Coronado-Heinsohn E B, Hilsenbeck S G, McCue B L, Wakeling A E, McClelland R A. Comparison of the effects of a pure steroidal antiestrogen with those of tamoxifen in a model of human breast cancer. J Natl Cancer Inst 1995;87:746-50.
[0445] Osborne, C. K., Bardou, V., Hopp, T. A., Chamness, G. C., Hilsenbeck, S. G., Fuqua, S. A., Wong, J., Allred, D. C., Clark, G. M., and Schiff, R. Role of the estrogen receptor coactivator AIB1 (SRC-3) and HER-2/neu in tamoxifen resistance in breast cancer. J Natl Cancer Inst, 95: 353-361, 2003.
[0446] Osborne, C. K., Coronado-Heinsohn, E. B., Hilsenbeck, S. G., McCue, B. L., Wakeling, A. E., and McClelland, R. A. Comparison of the effects of a pure steroidal antiestrogen with those of tamoxifen in a model of human breast cancer. J Natl Cancer Inst, 87: 746-750, 1995.
[0447] Osborne, C. K., V. Bardou, et al. (2003). “Role of the estrogen receptor coactivator AIB1 (SRC-3) and HER-2/neu in tamoxifen resistance in breast cancer.” J Natl Cancer Inst 95(5): 353-61.
[0448] Osin P, Crook T, Powles T, Peto J, Gusterson B. Hormone status of in-situ cancer in BRCA1 and BRCA2 mutation carriers. Lancet 1998;351:1487.
[0449] Paech, K., P. Webb, et al. (1997). “Differential ligand activation of estrogen receptors ERα and ERb at AP1 sites.” Science 277(5331): 1508-10.
[0450] Paget S. The distribution of secondary growths in cancer of the breast. Lancet 1989;I:571-3.
[0451] Parra I, Hopp T A, Osborne C K, Allred D C, O'Connell P, Hilsenbeck S, et al. Differential gene expression profiles associated with breast cancer metastasis. Proc Am Assoc Can Res 2002;43:903.
[0452] Perou C M, Sørlie T, Eisen M B, Van de Rijn M, Jeffrey S S, Rees C, et al. Molecular portraits of human breast tumours. Nature 2000;406:747-52.
[0453] Porter D A, Krop I E, Nasser S, Sgroi D, Kaelin C M, Marks J R, et al. A SAGE (Serial Analysis of Gene Expression) view of breast tumor progression. Cancer Research 2001;61:5697-702.
[0454] Prall, O. W., Rogan, E. M., Musgrove, E. A., Watts, C. K., and Sutherland, R. L. c-Myc or cyclin D1 mimics estrogen effects on cyclin E-Cdk2 activation and cell cycle reentry. Mol Cell Biol, 18: 4499-4508, 1998.
[0455] Quiet C A, Ferguson D J, Weichselbaum R R, Hellman S. Natural history of node-negative breast cancer: a study of 826 patients with long-term follow-up. Journal of Clinical Oncology 1995;13:1144-51.
[0456] Ravdin, P. M., S. Green, et al. (1992). “Prognostic significance of progesterone receptor levels in estrogen receptor-positive patients with metastatic breast cancer treated with tamoxifen: results of a prospective Southwest Oncology Group study.” J Clin Oncol 10(8): 1284-91.
[0457] Razandi, M., A. Pedram, et al. (2000). “Plasma membrane estrogen receptors signal to antiapoptosis in breast cancer.” Mol Endocrinol 14(9): 1434-47.
[0458] Reid, J. F., Lusa, L., De Cecco, L., Coradini, D., Veneroni, S., Daidone, M. G., Gariboldi, M., and Pierotti, M. A. Limits of predictive models using microarray data for breast cancer clinical treatment outcome. J Natl Cancer Inst, 97: 927-930, 2005.
[0459] Richer J K, Lange C A, Manning N G, Owen G, Powell R, Horwitz K B. Convergence of progesterone with growth factor and cytokine signaling in breast cancer. Progesterone receptors regulate signal transducers and activators of transcription expression and activity. J Biol Chem 1998;273:31317-26.
[0460] Richer, J. K., Lange, C. A., Manning, N. G., Owen, G., Powell, R., and Horwitz, K. B. Convergence of progesterone with growth factor and cytokine signaling in breast cancer. Progesterone receptors regulate signal transducers and activators of transcription expression and activity. J Biol Chem, 273: 31317-31326, 1998.
[0461] Roodi, N., L. R. Bailey, et al. (1995). “Estrogen receptor gene analysis in estrogen receptor-positive and receptor-negative primary breast cancer.” Journal of the National Cancer Institute 87(6): 446-51.
[0462] Ross D T, Scherf U, Eisen M B, Perou C M, Rees C, Spellman P, et al. Systematic variation in gene expression patterns in human cancer cell lines. Nat Genet 2000;24:227-35.
[0463] Santen, R. J., R. X. Song, et al. (2002). “The role of mitogen-activated protein (MAP) kinase in breast cancer.” J Steroid Biochem Mol Biol 80(2): 239-56.
[0464] Scarff R W, Torioni H. Histological typing of breast tumors. In International histological. 2nd ed; 1968. p. 13-20.
[0465] Schwirzke M, Evtimova V, Burtscher H, Jarsch M, Tarin D, Weidle U H. Identification of metastasis-associated genes by transcriptional profiling of a pair of metastatic versus non-metastatic human mammary carcinoma cell lines. Anticancer Res 2001;21:1771-6.
[0466] Sgroi D C, Teng S, Robinson G, LeVangie R, Hudson J R, Jr., Elkahloun A G. In vivo gene expression profile analysis of human breast cancer progression. Cancer Research 1999;59:5656-61.
[0467] Shiau, A. K., D. Barstad, et al. (1998). “The structural basis of estrogen receptor/coactivator recognition and the antagonism of this interaction by tamoxifen.” Cell 95: 927-937.
[0468] Shou J, Massarweh S, Osborne C K, Wakeling A E, Ali S, Weiss H, et al. Mechanisms of tamoxifen resistance: increased estrogen receptor-HER2/neu cross-talk in ER/HER2-positive breast cancer. J Natl Cancer Inst 2004;96:926-35.
[0469] Shou, J., Massarweh, S., Osborne, C. K., Wakeling, A. E., Ali, S., Weiss, H., and Schiff, R. Mechanisms of tamoxifen resistance: increased estrogen receptor-HER2/neu cross-talk in ER/HER2-positive breast cancer. J Natl Cancer Inst, 96: 926-935, 2004.
[0470] Simon R, Radmacher M D, Dobbin K, McShane L M. Pitfalls in the use of DNA microarray data for diagnostic and prognostic classification. J Natl Cancer Inst 2003;95:14-8.
[0471] Simon, R. (1993). Design and conduct of clinical trials. Cancer: Principles & Practice of Oncology. V. T. DeVita, Jr., S. Hellman and S. A. Rosenberg. Philadelphia, J. B. Lippincott Co.
[0472] Smith, C. L., Z. Nawaz, et al. (1997). “Coactivator and corepressor regulation of the agonist/antagonist activity of the mixed antiestrogen, 4-Hydroxytamoxifen.” Molecular Endocrinology 11: 657-666.
[0473] Song, R. X., Santen, R. J., Kumar, R., Adam, L., Jeng, M. H., Masamura, S., and Yue, W. Adaptive mechanisms induced by long-term estrogen deprivation in breast cancer cells. Mol Cell Endocrinol, 193: 29-42, 2002.
[0474] Sorlie T, Perou C M, Tibshirani R, Aas T, Geisler S, Johnsen H, et al. Gene expression patterns of breast carcinomas distinguish tumor subclasses with clinical implications. Proc. Natl. Academy Science USA 2001;98:10869-74.
[0475] Soulez, M. and M. G. Parker (2001). “Identification of novel oestrogen receptor target genes in human ZR75-1 breast cancer cells by expression profiling.” J Mol Endocrinol 27(3): 259-74.
[0476] Stemmermann, G. N. (1991). “The pathology of breast cancer in Japanese women compared to other ethnic groups: a review.” Breast Cancer Res Treat 18 Suppl 1: S67-72.
[0477] Stendahl, M., A. A. Kronblad, et al. (2004). “Cyclin D1 overexpression is a negative predictive factor for tamoxifen response in postmenopausal breast cancer patients.” Br J Cancer 90(10): 1942-8.
[0478] Stendahl, M., Kronblad, A., Ryden, L., Emdin, S., Bengtsson, N. O., and Landberg, G. Cyclin D1 overexpression is a negative predictive factor for tamoxifen response in postmenopausal breast cancer patients. Br J Cancer, 90: 1942-1948, 2004.
[0479] Stonelake, P. S., P. G. Baker, et al. (1994). “Steroid receptors, pS2 and cathepsin D in early clinically node-negative breast cancer.” Eur J Cancer 30A(1): 5-11.
[0480] Sun, H., Charles, C. H., Lau, L. F., and Tonks, N. K. MKP-1 (3CH134), an immediate early gene product, is a dual specificity phosphatase that dephosphorylates MAP kinase in vivo. Cell, 75: 487-493, 1993.
[0481] The_ATAC_Trialists'_Group (2002). “Anastrozole anlone or in combination with tamoxifen versus tamoxifen alone for adjuvant treatment of postmenopausal women with early breast cancer: first results of the ATAC randomised trial.” Lancet 359(9324): 2131-2139.
[0482] Thottassery, J. V., Sun, Y., Westbrook, L., Rentz, S. S., Manuvakhova, M., Qu, Z., Samuel, S., Upshaw, R., Cunningham, A., and Kern, F. G. Prolonged extracellular signal-regulated kinase 1/2 activation during fibroblast growth factor 1- or heregulin beta1-induced antiestrogen-resistant growth of breast cancer cells is resistant to mitogen-activated protein/extracellular regulated kinase kinase inhibitors. Cancer Res, 64: 4637-4647, 2004.
[0483] Torhorst J, Bucher C, Kononen J, Haas P, Zuber M, Kochli O R, et al. Tissue microarrays for rapid linking of molecular changes to clinical endpoints. Am J Pathol 2001;159:2249-56.
[0484] Tzukerman, M. T., A. Esty, et al. (1994). “Human estrogen receptor transactivational capacity is determined by both cellular and promoter context and mediated by two functionally distinct intramolecular regions.” Molecular Endocrinology 8(1): 21-30.
[0485] van de Rijn M, Perou C M, Tibshirani R, Haas P, Kallioniemi 0, Kononen J, et al. Expression of cytokeratins 17 and 5 identifies a group of breast carcinomas with poor clinical outcome. Am J Pathol 2002;161:1991-6.
[0486] van de Vijver M J, He Y D, van't Veer L J, Dai H, Hart A A, Voskuil D W, et al. A gene-expression signature as a predictor of survival in breast cancer. N Engl J Med 2002;347:1999-2009.
[0487] van't Veer L J, Dai H, van De Vijver M J, He Y D, Hart A A, Mao M, et al. Gene expression profiling predicts clinical outcome of breast cancer. Nature 2002;415:530-6.
[0488] van't Veer L J, Dai H, van de Vijver M J, He Y D, Hart A A M, Mao M, et al. Gene expression profiling predicts clinical outcome of breast cancer. Nature 2002;415:530-6.
[0489] Vegeto, E., M. M. Shahbaz, et al. (1993). “Human progesterone receptor A form is a cell- and promoter-specific repressor of human progesterone receptor B function.” Mol Endocrinol 7(10): 1244-55.
[0490] Velculescu V E, Zhang L, Vogelstein B, Kinzler K W. Serial analysis of gene expression. Science 1995;270:484-7.
[0491] Verhoog L C, Brekelmans C T, Seynaeve C, van den Bosch L M, Dahmen G, van Geel A N, et al. Survival and tumour characteristics of breast-cancer patients with germline mutations of BRCA1. Lancet 1998;351:316-21.
[0492] Walter, P., S. Green, et al. (1985). “Cloning of the human estrogen receptor cDNA.” Proceedings of the National Academy of Science of the United States of America 82: 7889-7893.
[0493] Warmka, J. K., Mauro, L. J., and Wattenberg, E. V. Mitogen-activated protein kinase phosphatase-3 is a tumor promoter target in initiated cells that express oncogenic Ras. J Biol Chem, 279: 33085-33092, 2004.
[0494] Welch D R, Steeg P S, Rinker-Schaeffer C W. Molecular biology of breast cancer metastasis: Genetic regulation of human breast carcinoma metastasis. Breast Cancer Res 2000;2:408-16.
[0495] Wen, D. X., Y. F. Xu, et al. (1994). “The A and β forms of the human progesterone receptor operate through distinct signaling pathways within target cells.” Mol Cell Biol 14(12): 8356-64.
[0496] West M, Blanchette C, Dressman H, Huang E, Ishida S, Spang R, et al. Predicting the clinical status of human breast cancer by using gene expression profiles. Proc Natl Acad Sci USA 2001;98:11462-7.
[0497] Wijayaratne, A. L. and McDonnell, D. P. The human estrogen receptor-alpha is a ubiquitinated protein whose stability is affected differentially by agonists, antagonists, and selective estrogen receptor modulators. J Biol Chem, 276: 35684-35692, 2001.
[0498] Wilson K S, Roberts H, Leek R, Harris A L, Geradts J. Differential gene expression patterns in HER2/neu-positive and -negative breast cancer cell lines and tissues. Am J Pathol 2002;161:1171-85.
[0499] Wright, G. W. and Simon, R. M. A random variance model for detection of differential gene expression in small microarray experiments. Bioinformatics, 19: 2448-2455, 2003.
[0500] Zajchowski D A, Bartholdi M F, Gong Y, Webster L, Liu H L, Munishkin A, et al. Identification of gene expression profiles that predict the aggressive behavior of breast cancer cells. Cancer Res 2001;61:5168-78.
[0501] Zhang D, Salto-Tellez M, Putti T C, Do E, Koay E S. Reliability of tissue microarrays in detecting protein expression and gene amplification in breast cancer. Mod Pathol 2003;16:79-85.
[0502] Zhang, Q. X., A. Borg, et al. (1997). “An estrogen receptor mutant with strong hormone-independent activity from a metastatic breast cancer.” Cancer Research 57(7): 1244-1249.
[0503] Zhang, Z., H. Yamashita, et al. (2003). “Estrogen Receptor alpha Mutation (A-to-G Transition at Nucleotide 908) Is Not Found in Different Types of Breast Lesions from Japanese Women.” Breast Cancer 10(1): 70-73.
[0504] Zhao H, Hastie T, Whitfield M L, Borresen-Dale A L, Jeffrey S S. Optimization and evaluation of T7 based RNA linear amplification protocols for cDNA microarray analysis. BMC Genomics 2002;3:31.
[0505] Zhou B, Wu L, Shen K, Zhang J, Lawrence D S, Zhang Z Y. Multiple regions of MAP kinase phosphatase 3 are involved in its recognition and activation by ERK2. J Biol Chem 2001;276:6506-15.
[0506] Zhou, B., Wu, L., Shen, K., Zhang, J., Lawrence, D. S., and Zhang, Z. Y. Multiple regions of MAP kinase phosphatase 3 are involved in its recognition and activation by ERK2. J Biol Chem, 276: 6506-6515, 2001.
[0507] Zhou, Q., T. Hopp, et al. (2001). “Cyclin D1 in breast premalignancy and early breast cancer: Implications for prevention and treatment.” Cancer Lett 162(1): 3-17.
[0508] Zwijsen, R. M. L., E. Wientjens, et al. (1997). “CDK-independent activation of estrogen receptor by cyclin D1.” Cell 88: 405-415.

[0509] Although the present invention and its advantages have been described in detail, it should be understood that various changes, substitutions and alterations can be made herein without departing from the spirit and scope of the invention as defined by the appended claims. Moreover, the scope of the present application is not intended to be limited to the particular embodiments of the process, machine, manufacture, composition of matter, means, methods and steps described in the specification. As one of ordinary skill in the art will readily appreciate from the disclosure of the present invention, processes, machines, manufacture, compositions of matter, means, methods, or steps, presently existing or later to be developed that perform substantially the same function or achieve substantially the same result as the corresponding embodiments described herein may be utilized according to the present invention. Accordingly, the appended claims are intended to include within their scope such processes, machines, manufacture, compositions of matter, means, methods, or steps.

What is claimed is:

1. A method of predicting the response of an individual to a chemotherapy, comprising the steps of:
providing the level of one or more expressed polynucleotides from an individual on chemotherapy, said level from tumors that grow during or after the chemotherapy; and
comparing the level of one or more expressed polynucleotides to a control, wherein a difference between the level of at least one expressed polynucleotide predicts resistance to chemotherapy in the individual.

2. The method of claim 1, wherein the difference between the levels is defined as being higher in the individual than the control, as being lower in the individual than the control, or a combination of expressed polynucleotides being higher or lower in the individual compared to the control.

3. The method of claim 1, wherein the difference between the level of at least one expressed polynucleotide in the individual and the control is greater than one-fold.

4. The method of claim 1, wherein providing the level of the expressed polynucleotides is further defined as providing the level of expressed RNAs.

5. The method of claim 1, wherein providing the level of the expressed polynucleotides is further defined as providing the level of expressed proteins.

6. The method of claim 4, wherein providing the level of RNAs from tumors that grow during the chemotherapy comprises the following steps:
obtaining one or more cells from tumors that grow during or after the chemotherapy;
isolating RNA from the one or more cells; and
determining the level of one or more of the RNAs.

7. The method of claim 6, wherein the RNA levels are determined by microarray analysis, quantitative polymerase chain reaction, or both.

8. The method of claim 1, wherein the tumors that grow during or after the chemotherapy occurred within about one month to about five years from initiation of the chemotherapy.

9. The method of claim 1, wherein the individual has breast cancer.

10. The method of claim 1, wherein the chemotherapy is further defined as a hormone therapy.

11. The method of claim 1, wherein the hormone therapy comprises tamoxifen.

12. The method of claim 1, wherein the polynucleotides are expressed from one or more polynucleotides listed in Table 1, Table 2, or both.

13. The method of claim 1, wherein one of the expressed polynucleotides comprises DUSP6.

14. The method of claim 1, wherein when the method predicts the cancer as resistant to the chemotherapy, the individual is subjected to an alternative cancer treatment.

15. The method of claim 14, wherein the alternative cancer treatment comprises chemotherapy, radiation, surgery, gene therapy, immunotherapy, hormone therapy, or a combination thereof.

16. The method of claim 15, wherein the alternative cancer treatment being chemotherapy comprises an aromatase inhibitor, Iressa, raloxifene, ZD1839, trastuzumab, letrozole, an agent that targets the HER-2 receptor, or a combination thereof.

17. As a composition of matter, isolated expressed polynucleotides the levels of which are indicative of resistance to a chemotherapy, wherein one or more of the expressed polynucleotides are listed in Table 1, Table 2, or both.

18. The composition of claim 17, wherein the expressed polynucleotides are comprised on a substrate.

19. The composition of claim 18, wherein the substrate comprises a microarray chip.

20. The composition of claim 17, wherein the chemotherapy comprises tamoxifen.

21. As a composition of matter, a breast cancer RNA expression profile comprising DUSP6, EBP50, RhoGDIa, or a combination thereof.

22. The composition of claim 21, wherein the level of DUSP6 is indicative of resistance to tamoxifen.

23. The composition of claim 21, wherein the level of EBP50 is indicative of resistance to tamoxifen.

24. The composition of claim 21, wherein the level of RhoGDIa is indicative of resistance to tamoxifen.

25. A method of determining resistance to a chemotherapy in the cancer of an individual, comprising the step of identifying the expression level of DUSP6, EBP50, RhoGDIa, or a combination thereof in one or more cancer cells in the individual.

26. The method of claim 25, wherein the chemotherapy comprises tamoxifen.

27. The method of claim 25, further defined as comparing the level of DUSP6, EBP50, and/or RhoGDIa, respectively, in one or more cancer cells of the individual with the level of DUSP6, EBP50, and/or RhoGDIa, respectively, from one or more cells that are sensitive to the chemotherapy.

28. The method of claim 25, wherein when the level in the one or more cancer cells of the individual is higher than the level in one or more cells that are sensitive to the chemotherapy, a cancer of the individual is resistant to the chemotherapy.

29. The method of claim 25, wherein the identifying step comprises identifying an expressed DUSP6 EBP50, and/or RhoGDIa RNA level, respectively; an expressed DUSP6, EBP50, and/or RhoGDIa protein level, respectively; or both.

30. The method of claim 29, wherein the identifying step is further defined as comprising microarray analysis.

31. The method of claim 25, wherein when the cancer is resistant to the chemotherapy, the method further comprises subjecting the individual to an alternative cancer treatment.

32. The method of claim 31, wherein the alternative cancer treatment comprises chemotherapy, radiation, surgery, immunotherapy, hormone therapy, gene therapy, or a combination thereof.

The application's sequence listing, which the Patent Office published only in electronic form, follows.

SEQUENCE LISTING (167 sequences)

SEQ ID NO: 1 - DNA, 2084 bp, Homo sapiens
aaccgcatctgcagcgagcaactgagaagccaagactgagccggcggccgcggcgcagcgaacgagcagtgaccgtgctcctacccagctctgcttcacagcgcccacctgtctccgcccctcggcccctcgcccggctttgcctaaccgccacgatgatgttctcgggcttcaacgcagactacgaggcgtcatcctcccgctgcagcagcgcgtccccggccggggatagcctctcttactaccactcacccgcagactccttctccagcatgggctcgcctgtcaacgcgcaggacttctgcacggacctggccgtctccagtgccaacttcattcccacggtcactgccatctcgaccagtccggacctgcagtggctggtgcagcccgccctcgtctcctctgtggccccatcgcagaccagagcccctcaccctttcggagtccccgccccctccgctggggcttactccagggctggcgttgtgaagaccatgacaggaggccgagcgcagagcattggcaggaggggcaaggtggaacagttatctccagaagaagaagagaaaaggagaatccgaagggaaaggaataagatggctgcagccaaatgccgcaaccggaggagggagctgactgatacactccaagcggagacagaccaactagaagatgagaagtctgctttgcagaccgagattgccaacctgctgaaggagaaggaaaaactagagttcatcctggcagctcaccgacctgcctgcaagatccctgatgacctgggcttcccagaagagatgtctgtggcttcccttgatctgactgggggcctgccagaggttgccaccccggagtctgaggaggccttcaccctgcctctcctcaatgaccctgagcccaagccctcagtggaacctgtcaagagcatcagcagcatggagctgaagaccgagccctttgatgacttcctgttcccagcatcatccaggcccagtggctctgagacagcccgctccgtgccagacatggacctatctgggtccttctatgcagcagactgggagcctctgcacagtggctccctggggatggggcccatggccacagagctggagcccctgtgcactccggtggtcacctgtactcccagctgcactgcttacacgtcttccttcgtcttcacctaccccgaggctgactccttccccagctgtgcagctgcccaccgcaagggcagcagcagcaatgagccttcctctgactcgctcagctcacccacgctgctggccctgtgagggggcagggaaggggaggcagccggcacccacaagtgccactgcccgagctggtgcattacagagaggagaaacacatcttccctagagggttcctgtagacctagggaggaccttatctgtgcgtgaaacacaccaggctgtgggcctcaaggacttgaaagcatccatgtgtggactcaagtccttacctcttccggagatgtagcaaaacgcatggagtgtgtattgttcccagtgacacttcagagagctggtagttagtagcatgttgagccaggcctgggtctgtgtctcttttctctttctccttagtcttctcatagcattaactaatctattgggttcattattggaattaacctggtgctggatattttcaaattgtatctagtgcagctgattttaacaataactactgtgttcctggcaatagtgtgttctgattagaaatgaccaatattatactaagaaaagatacgactttattttctggtagatagaaataaatagctatatccatgtactgtagtttttcttcaacatcaatgttcattgtaatgttactgatcatgcattgttgaggtggtctgaatgttctgacattaacagttttccatgaaaacgttttattgtgtttttaatttatttattaagatggattctcagatatttatatttttattttatttttttctaccttgaggtcttttgacatgtggaaagtgaatttgaatgaaaaatttaagcattgtttgcttattgttccaagacattgtcaataaa

SEQ ID NO: 2 - DNA, 1208 bp, Homo sapiens
tcttttttttgcctgtccaccatctccctattaccctttggtcgagagggaaagcagaagaagtctgctggtcacagcggggcacctcgaggagaggacgactaggagcacacggcccggaaaggtccagaataactgtgcttgaagaagaaaattcccaacatggacaaaccacgcaaagaaaatgaagaagagccgcagagcgcgcccaagaccgatgaggagaggcctccggtggagcactctcccgaaaagcagtcccccgaggagcagtcttcggaggagcagtcctcggaggaggagttctttcctgaggagctcttgcctgagctcctgcctgagatgctcctctcggaggagcgccctccgcaggagggtctttccaggaaggacctgtttgaggggcgccctcccatggagcagcctccttgtggagtaggaaaacataagcttgaagaaggaagctttaaagaaaggttggctcgttctcgcccgcaatttagaggggacatacatggcagaaatttaagcaatgaggagatgatacaggcagcagatgagctagaagagatgaaaagagtaagaaacaaactgatgataatgcactggaaggcaaaacggagccgtccttatcctatttaatgtgttcggcctttaattctgttttgcctgctaatagtattgccattgccacctggactttctgtttgcattttcttaatgccttttcccatattctgaattttaactttttgtgaggctttattttagatgtttagcatgtaactcgcttaaagttgaggtttccccctaaaatctacaagtttccctctttcagtcatgagccctacacatttgcatgaaagatgtacattatatattgtgaaacgaaaaaagcaattttcaaatggtatatattgtatcccatttttgtaaaaaaaatgtatatttatatattaatatgcaaagaaaaagctaaaagtatagacttcaaaggcataacagtggttgtgtggtaagataataggtgattttttaaatttttgttttatctgaatttctcattttttcaggacaaacgttttacttgtgttgcaaaaatatataatgaaaaaatcacacaattttgaagaaaactgtcaatcagcttataacgacaatgtggcacttaataaatacttgtcagaactttaaaaaaaaaaaaaaaa

SEQ ID NO: 3 - DNA, 390 bp, Homo sapiens
atgtctggtcgcggcaaaggcggaaaaggcttggggaagggtggtgctaagcgccatcgtaaggtgctccgggataacatccagggcattacaaaaccggctattcgccgtttggctcggcgcggtggcgtcaagcgcatttccggtcttatctatgaggagactcgaggtgtgcttaaggttttcttagagaacgttattcgagacgccgtcacctatacggagcacgccaagcgcaaaactgtcacagccatggatgtagtatatgccctaaaacgtcaggggcgcactctgtatggcttcggcggctgaatctaagaatacgcggtctcctgagaacttcaaaaaacaaaaacaaaaaaacccaaaggcccttttcagggccgctca

SEQ ID NO: 4 - DNA, 3678 bp, Homo sapiens
gacgcgcgccgggagccgcgggccgggccagccgggccgccggggcccagtgcgccgcgctcgcagccggtagcgcgccagcgccgtaggcgctcgctcggcagccgcggggccctaggccgtgccggggagggggcgagggcggcgcccaggcgcctgccgccccggaggcaggatgagcatcgagatcccggcgggactgacggagctgctgcagggcttcacggtggaggtgctgaggcaccagcccgcggacctgctggagttcgcgctgcagcacttcacccgcctgcagcaggagaacgagcgcaaaggcaccgcgcgcttcggccatgagggcaggacctggggggacctgggcgccgctgccgggggcggcacccccagcaagggggtcaacttcgccgaggagcccatgcagtccgactccgaggacggggaggaggaggaggcggcgcccgcggacgcaggggcgttcaatgctccagtaataaaccgattcacaaggcgtgcctcagtatgtgcagaagcttataatcctgatgaagaagaagatgatgcagagtccaggattatacatccaaaaactgatgatcaaagaaataggttgcaagaggcttgcaaagacatcctgctgtttaagaatctggatccggagcagatgtctcaagtattagatgccatgtttgaaaaattggtcaaagatggggagcatgtaattgatcaaggtgacgatggtgacaacttttatgtaattgatagaggcacatttgatatttatgtgaaatgtgatggtgttggaagatgtgttggtaactatgataatcgtgggagtttcggcgaactggccttaatgtacaatacacccagagcagctacaatcactgctacctctcctggtgctctgtggggtttggacagggtaaccttcaggagaataattgtgaaaaacaatgccaaaaagagaaaaatgtatgaaagctttattgagtcactgccattccttaaatctttggagttttctgaacgcctgaaagtagtagatgtgataggcaccaaagtatacaacgatggagaacaaatcattgctcagggagattcggctgattcttttttcattgtagaatctggagaagtgaaaattactatgaaaagaaagggtaaatcagaagtggaagagaatggtgcagtagaaatcgctcgatgctcgcggggacagtactttggagagcttgccctggtaactaacaaacctcgagcagcttctgcccacgccattgggactgtcaaatgtttagcaatggatgtgcaagcatttgaaaggcttctgggaccttgcatggaaattatgaaaaggaacatcgctacctatgaagaacagttagttgccctgtttggaacgaacatggatattgttgaacccactgcatgaagcaaaagtatggagcaagacctgtagtgacaaaattacacagtagtggttagtccactgagaatgtgtttgtgtagatgccaagcattttctgtgatttcaggttttttcctttttttacatttacaacgtatcaataaacagtagtgatttaatagtcaataggctttaacatcactttctaaagagtagttcataaaaaaatcaacatactgataaaatgactttgtactccacaaaattatgactgaaaggtttattaaaatgattgtaatatatagaaagtatctgtgtttaagaagataattaaaggatgttatcataggctatatgtgttttacttattcagactgataatcatattagtgactatccccatgtaagagggcacttggcaattaaacatgctacacagcatggcatcacttttttttataactcattaaacacagtaaaattttaatcatttttgttttaaagttttctagcttgataagttatgtgctggccttggcctattggtgaaatggtataaaatatcatatgcagttttaaaactttttatatttttgcaataaagtacattttgactttgttggcataatgtcagtaacatacatattccagtggttttatggacaggcaatttagtcattatgataataaggaaaacagtgttttagatgagagatcattaatgcatttttccctcatcaagcatatatctgcttttttttattttgcaattctctgtattctatgtctttaaaaatttgatcttgacatttaatgtcacaaagttttgtttttttaaaaagtgatttaaacttaagatccgacattttttgtattctttaagattttacacctaaaaaatctctcctatcccaaaaataatgtgggatccttatcagcatgcccacagtttatttctttgttcttcactaggcctgcataatacagtcctatgtagacatctgttcccttgggtttccgttctttcttaggatggttgccaacccacaatctcattgatcagcagccaatatgggtttgtttggtttttttaattcttaaaaacatcctctagaggaatagaaacaaatttttatgagcataaccctatataaagacaaaatgaatttctgaccttaccatatataccattaggccttgccattgctttaatgtagactcatagttgaaattagtgcagaaagaactcagatgtactagattttcattgttcattgatatgctcagtatgctgccacataagatgaatttaattatattcaaccaaagcaatatactcttacatgatttctaggccccatgacccagtgtctagagacattaattctaaccagttgtttgcttttaaatgagtgatttcattttgggaaacaggtttcaaatgaatatatatacatgggtaaaattactctgtgctagtgtagtcttactagagaatgtttatggtcccacttgtatatgaaaatgtggttagaatgttaattggataatgtatatataagaagttaaagtatgtaaagtataacttcagccacatttttagaacactgtttaacatttttgcaaaaccttcttgtaggaaaagagagctctctacatgaagatgacttgttttatatttcagattttattttaaaagccatgtctgttaaacaagaaaaaacacaaaagaactccagattcctggttcatcattctgtattcttactcactttttcaagttatctattttgttgcataaactaattgttaactattcatggaacagcaaacgcctgtttaataaagaactttgaccaaggctataaatgccacgtacattattttcagtattgttggttatatttaaattttccttacaataaagcacacttttataataaaatacatgaattattgtttttcatacttttttgcttgtttctttaaagttttctgacgtgcataatgcataattcattgaaaagcatgatagcaatgtggcatgtggaagcgaacccccagggcataacatagtaagaaagtatggttctgtatggcaataggtttttaaaattattagctattcatcatgtgtgggagaaataattgtggtgtgttgcagatttatttggccatttagaataaccaaatcaatctggctaactaggaatttatgtgtaaaattatctgattaaaacagctcaagtttgaaaaaaaaaaaaaaaaaa

SEQ ID NO: 5 - DNA, 2842 bp, Homo sapiens
gagacgctcgctgtttgtatccattgaggagctgcctcgcgcagggggtgtgcgaggctgagtccaagagatagcaaatcgagtcttaaataatccggggagaaagacgcccgggtagatttgaggtgcagccttggagggagggattagaagccgctagactttttttcctcccctctcagtagcacggagtccgaattaattggatttcattcactggggaggaacaaaaactatctgggcagcttcattgagagagattcattgacactaagagccagcggctgcagctgggtgcagagagaacctccggctttacttctgtctcgtctgccccaaccgctagcctcggcttgggtaaggcgaggcggaattaaaccccgctccgagagcggcagcttcgcgcgcggtgcgctcggcctatgcctgccccgaggggcgtctggtaggcaccccgccctctcccgcagctcgacccccatgatagatacgctcagacccgtgcccttcgcgtcggaaatggcgatcagcaagacggtggcgtggctcaacgagcagctggagctgggcaacgagcggctgctgctgatggactgccggccgcaggagctatacgagtcgtcgcacatcgagtcggccatcaacgtggccatcccgggcatcatgctgcggcgcctgcagaagggtaacctgccggtgcgcgcgctcttcacgcgcggcgaggaccgggaccgcttcacccggcgctgtggcaccgacacagtggtgctctacgacgagagcagcagcgactggaacgagaatacgggcggcgagtcggtgctcgggctgctgctcaagaagctcaaggacgagggctgccgggcgttctacctggaaggtggcttcagtaagttccaagccgagttctccctgcattgcgagaccaatctagacggctcgtgtagcagcagctcgccgccgttgccagtgctggggctcgggggcctgcggatcagctctgactcttcctcggacatcgagtctgaccttgaccgagaccccaatagtgcaacagactcggatggtagtccgctgtccaacagccagccttccttcccagtggagatcttgcccttcctctacttgggctgtgccaaagactccaccaacttggacgtgttggaggaattcggcatcaagtacatcttgaacgtcacccccaatttgccgaatctctttgagaacgcaggagagtttaaatacaagcaaatccccatctcggatcactggagccaaaacctgtcccagtttttccctgaggccatttctttcatagatgaagcccggggcaagaactgtggtgtcttggtacattgcttggctggcattagccgctcagtcactgtgactgtggcttaccttatgcagaagctcaatctgtcgatgaacgatgcctatgacattgtcaaaatgaaaaaatccaacatatcccctaacttcaacttcatgggtcagctgctggacttcgagaggacgctgggactcagcagcccatgtgacaacagggttccagcacagcagctgtattttaccaccccttccaaccagaatgtataccaggtggactctctgcaatctacgtgaaagaccccacacccctccttgctggaatgtgtctggcccttcagcagtttctcttggcagcatcagctgggctgctttctttgtgtgtggccccaggtgtcaaaatgacaccagctgtctgtactagacaaggttaccaagtgcggaattggttaatactaacagagagatttgctccattctctttggaataacaggacatgctgtatagatacaggcagtaggtttgctctgtacccatgtgtacagcctacccatgcagggactgggattcgaggacttccaggcgcatagggtagaaccaaatgatagggtaggagcatgtgttctttagggccttgtaaggctgtttccttttgcatctggaactgactatataattgtcttcaatgaagactaattcaattttgcatatagaggagccaaagagagatttcagctctgtatttgtggtatcagtttggaaaaaaaaatctgatactccatttgattattgtaaatatttgatcttgaatcacttgacagtgtttgtttgaattgtgtttgttttttcctttgatgggcttaaaagaaattatccaaagggagaaagagcagtatgccacttcttaaaacagaacaaaacaaaaaaagaaaattgtgctcttttctaatccaaagggtatatttgcagcatgcttgactttaccaattctgatgacatctttacggacactattatcactaagaccttgttatggcgaagtctttagtctttttcatgtattttcctcatgattttttctctttatgtagtttgactatgccttacctttgtaaatatttttgcttgtgttgtcgcaaaggggataatctgggaaagacaccaaatcatgggctcactttaaaaaaagaaagaataaaaaaaccttcagctgtgctaaacagtatattacctctgtataaaattcttcagggagtgtcacctcaaatgcaatactttgggttggtttctttcctttaaaaaaatttgtataaaactggaagtgtgtgtgtgtgagcatgggtacccatttgataagagaaatgcatttgattgtgaagaagggagagttaaattctccattatgttcgtggtgtaaagtttagagctggaatttattataagaatgtaaaaccttaaattattaataaataactattttggctattgaaaaaaaaaaaaaaaaaaaaaaaa

SEQ ID NO: 6 - DNA, 3227 bp, Homo sapiens
cggcacggcgggcgcggctggcgcggctggggcggcaggggcggcggagagcgcgccgagccgcggccgagctggcccgcccgcccgtcgcacatgttccggaacggcgcccggccgtagccgcctgcggcgcctcctgtcggcccgagaagggagtgcggagaggcgccggtcgccacccgcggtgcccatggagcgggtgaagatgatcaacgtgcagcgtctgctggaggctgccgagtttttggagcgccgggagcgagagtgtgaacatggctacgcctcttcattcccgtccatgccgagcccccgactgcagcattcaaagcccccacggaggttgagccgggcacagaaacacagcagcgggagcagcaacaccagcactgccaacagacgagctcatctgcgcctttgtttagaacgcttaaaagttctgattccactaggaccagactgcacccggcacacaacacttggtttgctcaacaaagccaaagcacacatcaagaaacttgaagaagctgaaagaaaaagccagcaccagctcgagaatttggaacgagaacagagatttttaaagtggcgactggaacagctgcagggtcctcaggagatggaacgaatacgaatggacagcattggatcaactatttcttcagatcgttctgattcagagcgagaggagattgaagtggatgttgaaagcacagagttctcccatggagaagtggacaatataagtaccaccagcatcagtgacattgatgaccacagcagcctgccgagtattgggagtgacgagggttactccagtgccagtgtcaaactttcattcacttcatagaacccagcatgacataacagtgcagggcaaaatattcactgggccaattcaatacaaacaatctcttaaattgggttcatgatgcagtctcctctttaaaacaaaacaaaacaaaacaaaactatacttgaacaaaagggtcagaggacctgtatttaagcaaatacttagcaaaaagtggggcagagcctcccaaggagaacaaatattcagaatattcatattggaaaaatcacaatttttaatggcagcagaaaacttgtgtgaaattttcttgatttgagttgattgagaagaggacattggagatgccatcctctttctcttttctagtttgctcatactacattgagtagacacatttaaggatggggttatgaacccttcctgagctttatggtcctaaaagcaaaataaaaactattcgaatgaaaagacaagaaaatcaggtattaatcttggatagctaataatgagctattaaaactcagcctgggacagtttatcatgaagcctgtggatgatcaatcctttattattattttttttttttgaaaaaagctcatttcatgctctgcaaaaggagagactcccatgaagccttttgaaagggatcatcatgcagctcaactttctgttggattccatgctaagcaagctaaccttatcctgcattgttagcactaggcacccagctgccacctctccatcctgctgcccttaggccacatgggagcagtccatgcatgacagcctctatcctacaaggcctatgagtatggattgggggggccaaaaggaaaaagctccatgtgcctctttgtctgcgtgggtcagaagagttgtgcacgcagattagcaggccaaggtctgagccacagcagcatttttatttcagattttgataactgtttatatgtgttgaaaaccaaaatgacatctttttaaagcttatccataaaaaaaaatagatgtcttttatagtggaaaaacacatggggaaaaaaatcatctattttgatgcagcatttgataatgataaaacacctcacacctcactctttatagtgcacaaaatgaatgaggtctgggctaggtagaaaaagggtcaatgctatttttgtttttagaatcattaccttttaccagcttttaaccatctgatatctatagtagacacactatcatagttaacatagtaagttcagcacttgtctcattttaatgtaaagatttgcttccattttcctacaggcagtctctctcttcctcacagtcccactgtgcaggtgctattgttactcttacgaatattttcagtaatgttattttcttctaagtgaaatttctagcctgcactttgatgtcatgtgttccctttgtctttcaaactccaaggttcccttgtggccctctcccttaccctgggaaggcctcttggagaccttacccctggctgtttggactttgtatactttaaataatttaactacccttaattacttaaaaaaaaaaaaaagctttatgattttcataacttattgctgattttaatggattgttaatttcagtcctgtagttttattttatgtttagatagggctgggcaaggaaaaagaaaataaagacaaccatatttagcagtgcagttgagttgtgtgttaatgttagactatccctttgtgagtgacactttaacagcattcactgcttctatatatagtgtaccatcttggtcatacattacgcctcaacatatacttgtgctcttcctttgcctccagaagaagtttttccttgattgtgctatgtttcagtggaagaaattctttgaagtagatgtgagtgaaaaactgcatgcctttagaagcccagtatcagaacttgctacgtttcaggtgctagggacttaatgaaaaacaggacaaaacaattcctttttgtggcccaggtaaattatttctggtttcacttataattactaatggctgagtcaagatgttgtctctgtgtttgcttactcttgatcaagtgtgagacagtttgaagactgtgctaccatacaaagtgaatgaagccagtgactaagcttctgtttgttttgttattctcatggccttcgcttgcattatttgggccttcattcagatgaacttgaggtgccattttgttgcatatgtacaggattatgggctggaaagcatttgttataaacctatagtgcacattttaactgccccctaaattacccttccctgggtttgttttccttggggtggtgtagattgtatgagtaagaagtattaattttttaaaagacaaatcaactttgaagacacaaaagttaattggaagaaataaaaactgtgaacgaagaaaa

SEQ ID NO: 7 - DNA, 1339 bp, Homo sapiens
gaattccgattagtgtgatctcagctcaaggcaaaggtgggatatcatggcatctatctgggttggacaccgaggaacagtaagagattatccagactttagcccatcagtggatgctgaagctattcagaaagcaatcagaggaattggaactgatgagaaaatgctcatcagcattctgactgagaggtcaaatgcacagcggcagctgattgttaaggaatatcaagcagcatatggaaaggagctgaaagatgacttgaagggtgatctctctggccactttgagcatctcatggtggccctagtgactccaccagcagtctttgatgcaaagcagctaaagaaatccatgaagggcgcgggaacaaacgaagatgccttgattgaaatcttaactaccaggacaagcaggcaaatgaaggatatctctcaagcctattatacagtatacaagaagagtcttggagatgacattagttccgaaacatctggtgacttccggaaagctctgttgactttggcagatggcagaagagatgaaagtctgaaagtggatgagcatctggccaaacaagatgcccagattctctataaagctggtgagaacagatggggcacggatgaagacaaattcactgagatcctgtgtttaaggagctttcctcaattaaaactaacatttgatgaatacagaaatatcagccaaaaggacattgtggacagcataaaaggagaattatctgggcattttgaagacttactgttggccatagttaattgtgtgaggaacacgccggcctttttagccgaaagactgcatcgagccttgaagggtattggaactgatgagtttactctgaaccgaataatggtgtccagatcagaaattgaccttttggacattcgaacagagttcaagaagcattatggctattccctatattcagcaattaaatcggatacttctggagactatgaaatcacactcttaaaaatctgtggtggagatgactgaaccaagaagataatctccaaaggtccacgatgggctttcccaacagctccaccttacttcttctcatactatttaagagaacaagcaaatataaacagcaacttgtgttcctaacaggaattttcattgttctataacaacaacaacaaaagcgattattattttagagcatctcatttataatgtagcagctcataaatgaaattgaaaatggtattaaagatctgcaactactatccaacttatatttctgctttcaaagttaagaatctttatagttctactccattaaatataaagcaagataataaaacggaattc

SEQ ID NO: 8 - DNA, 4314 bp, Homo sapiens
cgagatcccggggagccagcttgctgggagagcgggacggtccggagcaagcccagaggcagaggaggcgacagagggaaaaagggccgagctagccgctccagtgctgtacaggagccgaagggacgcaccacgccagccccagcccggctccagcgacagccaacgcctcttgcagcgcggcggcttcgaagccgccgcccggagctgccctttcctcttcggtgaagtttttaaaagctgctaaagactcggaggaagcaaggaaagtgcctggtaggactgacggctgcctttgtcctcctcctctccaccccgcctccccccaccctgccttccccccctcccccgtcttctctcccgcagctgcctcagtcggctactctcagccaacccccctcaccacccttctccccacccgcccccccgcccccgtcggcccagcgctgccagcccgagtttgcagagaggtaactccctttggctgcgagcgggcgagctagctgcacattgcaaagaaggctcttaggagccaggcgactggggagcggcttcagcactgcagccacgacccgcctggttaggctgcacgcggagagaaccctctgttttcccccactctctctccacctcctcctgccttccccaccccgagtgcggagccagagatcaaaagatgaaaaggcagtcaggtcttcagtagccaaaaaacaaaacaaacaaaaacaaaaaagccgaaataaaagaaaaagataataactcagttcttatttgcacctacttcagtggacactgaatttggaaggtggaggattttgtttttttcttttaagatctgggcatcttttgaatctacccttcaagtattaagagacagactgtgagcctagcagggcagatcttgtccaccgtgtgtcttcttctgcacgagactttgaggctgtcagagcgctttttgcgtggttgctcccgcaagtttccttctctggagcttcccgcaggtgggcagctagctgcagcgactaccgcatcatcacagcctgttgaactcttctgagcaagagaaggggaggcggggtaagggaagtaggtggaagattcagccaagctcaaggatggaagtgcagttagggctgggaagggtctaccctcggccgccgtccaagacctaccgaggagctttccagaatctgttccagagcgtgcgcgaagtgatccagaacccgggccccaggcacccagaggccgcgagcgcagcacctcccggcgccagtttgctgctgctgcagcagcagcagcagcagcagcagcagcagcagcagcagcagcagcagcagcagcagcagcagcagcaagagactagccccaggcagcagcagcagcagcagggtgaggatggttctccccaagcccatcgtagaggccccacaggctacctggtcctggatgaggaacagcaaccttcacagccgcagtcggccctggagtgccaccccgagagaggttgcgtcccagagcctggagccgccgtggccgccagcaaggggctgccgcagcagctgccagcacctccggacgaggatgactcagctgccccatccacgttgtccctgctgggccccactttccccggcttaagcagctgctccgctgaccttaaagacatcctgagcgaggccagcaccatgcaactccttcagcaacagcagcaggaagcagtatccgaaggcagcagcagcgggagagcgagggaggcctcgggggctcccacttcctccaaggacaattacttagggggcacttcgaccatttctgacaacgccaaggagttgtgtaaggcagtgtcggtgtccatgggcctgggtgtggaggcgttggagcatctgagtccaggggaacagcttcggggggattgcatgtacgccccacttttgggagttccacccgctgtgcgtcccactccttgtgccccattggccgaatgcaaaggttctctgctagacgacagcgcaggcaagagcactgaagatactgctgagtattcccctttcaagggaggttacaccaaagggctagaaggcgagagcctaggctgctctggcagcgctgcagcagggagctccgggacacttgaactgccgtctaccctgtctctctacaagtccggagcactggacgaggcagctgcgtaccagagtcgcgactactacaactttccactggctctggccggaccgccgccccctccgccgcctccccatccccacgctcgcatcaagctggagaacccgctggactacggcagcgcctgggcggctgcggcggcgcagtgccgctatggggacctggcgagcctgcatggcgcgggtgcagcgggacccggttctgggtcaccctcagccgccgcttcctcatcctggcacactctcttcacagccgaagaaggccagttgtatggaccgtgtggtggtggtgggggtggtggcggcggcggcggcggcggcggcggcggcggcggcggcggcggcggcggcgaggcgggagctgtagccccctacggctacactcggccccctcaggggctggcgggccaggaaagcgacttcaccgcacctgatgtgtggtaccctggcggcatggtgagcagagtgccctatcccagtcccacttgtgtcaaaagcgaaatgggcccctggatggatagctactccggaccttacggggacatgcgtttggagactgccagggaccatgttttgcccattgactattactttccaccccagaagacctgcctgatctgtggagatgaagcttctgggtgtcactatggagctctcacatgtggaagctgcaaggtcttcttcaaaagagccgctgaagggaaacagaagtacctgtgcgccagcagaaatgattgcactattgataaattccgaaggaaaaattgtccatcttgtcgtcttcggaaatgttatgaagcagggatgactctgggagcccggaagctgaagaaacttggtaatctgaaactacaggaggaaggagaggcttccagcaccaccagccccactgaggagacaacccagaagctgacagtgtcacacattgaaggctatgaatgtcagcccatctttctgaatgtcctggaagccattgagccaggtgtagtgtgtgctggacacgacaacaaccagcccgactcctttgcagccttgctctctagcctcaatgaactgggagagagacagcttgtacacgtggtcaagtgggccaaggccttgcctggcttccgcaacttacacgtggacgaccagatggctgtcattcagtactcctggatggggctcatggtgtttgccatgggctggcgatccttcaccaatgtcaactccaggatgctctacttcgcccctgatctggttttcaatgagtaccgcatgcacaagtcccggatgtacagccagtgtgtccgaatgaggcacctctctcaagagtttggatggctccaaatcaccccccaggaattcctgtgcatgaaagcactgctactcttcagcattattccagtggatgggctgaaaaatcaaaaattctttgatgaacttcgaatgaactacatcaaggaactcgatcgtatcattgcatgcaaaagaaaaaatcccacatcctgctcaagacgcttctaccagctcaccaagctcctggactccgtgcagcctattgcgagagagctgcatcagttcacttttgacctgctaatcaagtcacacatggtgagcgtggactttccggaaatgatggcagagatcatctctgtgcaagtgcccaagatcctttctgggaaagtcaagcccatctatttccacacccagtgaagcattggaaaccctatttccccaccccagctcatgccccctttcagatgtcttctgcctgttataactctgcactactcctctgcagtgccttggggaatttcctctattgatgtacagtctgtcatgaacatgttcctgaattctatttgctgggctttttttttctctttctctcctttctttttcttcttccctccctatctaaccctcccatggcaccttcagactttgcttcccattgtggctcctatctgtgttttgaatggtgttgtatgcctttaaatctgtgatgatcctcatatggcccagtgtcaagttgtgcttgtttacagcactactctgtgccagccacacaaacgtttacttatcttatgccacgggaagtttagagagctaagattatctggggaaatcaaaacaaaaacaagcaaac

SEQ ID NO: 9 - DNA, 1791 bp, Homo sapiens
gagcccggctgcggatctgggaagcgcctcttcacggcactgggatccgcatctgcctgggatcatcaagccctagaagctgggtttctttaaattagggctgccgttttctgtttctccctgggctgcggaaagccagaagattttatctagcttatacaaggctgctggtgttccctctttttttccacgagggtgtttttggctgcaattgcatgaaatcccaatggtgtagaccagtggcgatggatctaggagtttaccaactgagacatttttcaatttctttcttgtcatccttgctggggactgaaaacgcttctgtgagacttgataatagctcctctggtgcaagtgtggtagctattgacaacaaaatcgagcaagctatggatctagtgaaaagccatttgatgtatgcggtcagagaagaagtggaggtcctcaaagagcaaatcaaagaactaatagagaaaaattcccagctggagcaggagaacaatctgctgaagacactggccagtcctgagcagcttgcccagtttcaggcccagctgcagactggctccccccctgccaccacccagccacagggcaccacacagccccccgcccagccagcatcgcagggctcaggaccaaccgcatagctgcctatgcccccgcagaactggctgctgcgtgtgaactgaacagacggagaagatgtgctagggagaatctgcctccacagtcacccatttcattgctcgctgcgaaagagacgtgagactgacatatgccattatctcttttccagtattaaacactcatatgcttatggcttggagaaatttcttagttgggtgaattaaaggttaatccgagaattagcatggatataccgggacctcatgcagcttggcagatatctgagaaatggtttaattcatgctcaggagctgtgtgcctttccatcccttccggctccctacccctcacttccaagggttctctctcctgcttgcgcttagtgtcctacatggggttgtgaagcgatggagctcctcactggactcgcctctctcctctcctccccccaggaggaacttgaaaggagggtaaaaagactaaaatgagggggaacagagttcactgtacaaatttgacaactgtcaccaaaattcataaaaaacaatagtactgtgcctctttcttctcaaacaatggatgacacaaaactatgagagtgacaaaatggtgacaggtagctgggacctaggctatcttaccatgaaggttgttttgcttattgtatatttgtgtatgtagtgtaactattttgtacaatagaggactgtaactactatttaggttgtacagattgaaatttagttgtttcattggctgtctgaggaggtgtggacttttatatatagatctacataaaaactgctacatgacaaaaaccacacctaaagaaattttaagaatttggcacagttactcactttgtgtaatctgaaatctagctgctgaatacgctgaagtaaatccttgttcactgaagtctttcaattgagctggttgaatactttgaaaaatgctcagttctaactaatgaaatggatttcccagtaggggtttctgcatatcacctgtatagtagttatatgcatatgtttctgtgcatgttctctacacaattgtaaggtgtcactgtatttaactgttgcacttgtcaactttcaataaagcatataaatgttgataaaaaaaaaaaaaaaaaaaaaaaaaaaaaaaaaaaaaaaa

SEQ ID NO: 10 - DNA, 1236 bp, Homo sapiens
acttggccttacactccgctcggctcaccatgtgtcactctcgcagctgccacccgaccatgaccatcctgcaggccccgaccccggccccctccaccatcccgggaccccggcggggctccggtcctgagatcttcaccttcgaccctctcccggagcccgcagcggcccctgccgggcgccccagcgcctctcgcgggcaccgaaagcgcagccgcagggttctctaccctcgagtggtccggcgccagctgccagtcgaggaaccgaacccagccaaaaggcttctctttctgctgctcaccatcgtcttctgccagatcctgatggctgaagagggtgtgccggcgcccctgcctccagaggacgcccctaacgccgcatccctggcgcccacccctgtgtcccccgtcctcgagccctttaatctgacttcggagccctcggactacgctctggacctcagcactttcctccagcaacacccggccgccttctaactgtgactccccgcactccccaaaaagaatccgaaaaaccacaaagaaacaccaggcgtacctggtgcgcgagagcgtatccccaactgggacttccgaggcaacttgaactcagaacactacagcggagacgccacccggtgcttgaggcgggaccgaggcgcacagagaccgaggcgcatagagaccgaggcacagcccagctggggctaggcccggtgggaaggagagcgtcgttaatttatttcttattgctcctaattaatatttatatgtatttatgtacgtcctcctaggtgatggagatgtgtacgtaatatttattttaacttatgcaagggtgtgagatgttccccctgctgtaaatgcaggtctcttggtatttattgagctttgtgggactggtggaagcaggacacctggaactgcggcaaagtaggagaagaaatggggaggactcgggtgggggaggacgtcccggctgggatgaagtctggtggtgggtcgtaagtttaggaggtgactgcatcctccagcatctcaactccgtctgtctactgtgtgagacttcggcggaccattaggaatgagatccgtgagatccttccatcttcttgaagtcgcctttagggtggctacgaggtagaggggtgggggttggtgggctgtcacggagcgactgtcgagatcgcctagtatgttctgtgaacacaaataaaattgatttactgtctgc

SEQ ID NO: 11 - DNA, 1208 bp, Homo sapiens
aaagcgagagtgagtgggaccggaggggcggggcatcatatgggcggggctgaggcgaggccccggcggccatcttgagccccgccttttacttcggcccgcttcttctggtcactccgccaccgtagaatcgcctaccatttggtgcaagcaaaaagcaatcagcaattggacaggaaaagaatggcattgaagcagatttccagcaacaagtgctttgggggattgcagaaagtttttgaacatgacagtgttgaactaaactgcaaaatgaaatttgctgtctacttaccaccaaaggcagaaacaggaaagtgccctgcactgtattggctctcaggtttaacttgcacagagcaaaattttatatcaaaatctggttatcatcagtctgcttcagaacatggtcttgttgtcattgctccagataccagccctcgtggctgcaatattaaaggtgaagatgagagctgggactttggcactggtgctggattttatgttgatgccactgaagatccttggaaaaccaactacagaatgtactcttatgtcacagaggagcttccccaactcataaatgccaattttccagtggatccccaaaggatgtctatttttggccactccatgggaggtcatggagctctgatctgtgctttgaaaaatcctggaaaatacaaatctgtgtcagcatttgctccaatttgcaaccctgtactctgtccctggggcaaaaaagcctttagtggatatttgggaacagatcaaagtaaatggaaggcttatgatgctacccaccttgtgaaatcctatccaggatctcagctggacatactaattgatcaagggaaagatgaccagtttcttttagatggacagttactccctgataacttcatagctgcctgtacagaaaagaaaatccccgttgtttttcgattgcaagagggttatgatcatagctactacttcattgcaacctttattactgaccacatcagacatcatgctaaatacctgaatgcatgaaaaaactccaaataagagaatctcttcaggattataaaagttgtaaaatgcaactgtattgctgagcaaaaaaaaaaaaaattcaaaacattggattttatagtgctaaaagggctttattctatagttgaatcacctctgaataaagatataaaacctaaaaaaaaaaaaaaaaa

SEQ ID NO: 12 - DNA, 4349 bp, Homo sapiens
gggggctgcaggaagccgccgcgccgccgcttttgttgtcagggacccagcgaggagcgccgctcgccggccgccgccaccctctctcgctgcagcctgctgtgcgctgcacggcctggggcccgggagccccgcccgctctgcccatgagggggccccgcgaccaccgctgcttccagcccggggcggcgcggcgctgaggcggcggcggcggcgctgccccctctgcgggaagcgggcggccccggccgcctccgcgagggcaccatggaggtgaatgcaggaggtgtgattgcctatatcagttcttccagctcagcctcaagccatgcctcttgtcacagtgagggttctgagaatagtttccagtcctcctcctcttctgttccatcttctccaaatagctctaattctgataccaatggtaatcccaagaatggtgatctcgccaatattgaaggcatcttgaagaatgatcgaatagattgttctatgaaaacaagcaaatcgagtgcacctgggatgacaaaaagtcatagtggtgtgacaaaatttagtggcatggttctactgtgtaaagtctgtggggatgtggcgtcaggattccactatggagttcatgcttgcgaaggctgtaagggtttctttcggagaagtattcaacaaaacatccagtacaagaagtgcctgaagaatgaaaactgttctataatgagaatgaataggaacagatgtcagcaatgtcgcttcaaaaagtgtctgtctgttggaatgtcaagagatgctgttcggtttggtcgtattcctaagcgtgaaaaacagaggatgctaattgaaatgcaaagtgcaatgaagaccatgatgaacagccagttcagtggtcacttgcaaaatgacacattagtagaacatcatgaacagacagccttgccagcccaggaacagctgcgacccaagccccaactggagcaagaaaacatcaaaagctcttctcctccatcttctgattttgcaaaggaagaagtgattggcatggtgaccagagctcacaaggatacctttatgtataatcaagagcagcaagaaaactcagctgagagcatgcagcccaagagaggagaacggattcgcaagaacatggagcaatataatttaaatcatgatcattgcggcaatgggcttagcagccattttccctgtagtgagagccagcagcatctcaatggacagttcaaagggaggaatataatgcattacccaaatggtcatgccatttgtattgcaaatggacattgtatgaacttctccaatgcttatactcaaagagtatgtgatagagttccgatagatggattttctcagaatgagaacaagaatagttacctgtgcaacactggaggaagaatgcatctggtttgtccaatgagtaagtctccatatgtggatcctcataaatcaggacatgaaatctgggaagaattttcgatgagcttcactccagcagtgaaagaagtggtggaatttgcaaagcgtattcctgggttcagagatctctctcagcatgaccaggtcaaccttttaaaggctgggacttttgaggttttaatggtacggttcgcatcattatttgatgcaaaggaacgtactgtcacctttttaagtggaaagaaatatagtgtggatgatttacactcaatgggagcaggggatctgctaaactctatgtttgaatttagtgagaagctaaatgccctccaacttagtgatgaagagatgagtttgtttacagctgttgtcctggtatctgcagatcgatctggaatagaaaacgtcaactctgtggaggctttgcaggaaactctcattcgtgcactaaggaccttaataatgaaaaaccatccaaatgaggcctctatttttacaaaactgcttctaaagttgccagatcttcgatctttaaacaacatgcactctgaggagctcttggcctttaaagttcacccttaaggcctttgtttatttaaacatgaactgatggtaactgtacattttgtgctaaaatgcatatttatatgtgtataccatatgtggagatagaaaagacctttaagacaataaaagattgtaggctatctctgtaatcatgcaatagctgttcggattgagaactcttcagccatgattagacgttgactgcatctccctgatagaccaatcagctgtgtcgcacttaaactggagaagttacactgaagtataatcacactgaatgttatactttttcatctgccaaaaccaaaaaccattttgatctccctgtggttatcaatataacgcacaatcacaagtgtatgaggacttagaaattaatcctttgtggtaggagttctgttgaatgatggaaatcttattactaccacaagactatttgttctggtaattggagacttcgggatttaggagatctccatgtctgtatttactctaccactgctaaagtgtgtggtcctgggtagtttacttgcttgcggaaaatgagaattgatggtgtccccaatgccccacctcacagagttactaaaaaatgtctgtaaagcatatttacctcttgggagataggcactatgtaaataaggtaaaatttctgttattacaattattcataataatattcttttcttatttctaagcctttctgggaaatcatttcagtccacaccaaccatattattcagggttcctgccatatgtgtggggtatcctactgatacacacgtattcaaagtttatgggtacaacaaagacatagtacatgtacataatatgtatgtgaatatagttaaatatatttcttcacaatattttaaactgtgaagaactttatcatacaggaaacttaaaacaagaggtgtcaaaagacccaaattaggtgcattttacttgtttatgatggcataaccattgctttaaaatgtttagacagtagaatattgaatttatgctctatttttgtttatttaagcaacacttaatgtaaaagtgcaacaggcaattgaatccaaatttcaacgacaaaaaaaaaaaacatgtattttagagttcatctttggcaaaatctttggttcagggtactagttgtttaaaagttgattcatattcttaccttgtgctgagaaaggttgcattgctgccccttatacacatgctgcagcttgatgttaaagaatttttattctttctgaagaactaattaatgtttaaagcaactgtttaatatgatggcatgtgtgtgtgtgcgtgcgtgtgtatgttctgagtccacttcttttttcctaaataacactacagggattttgtcatattagatttaatttataatttgaaaaatcatctagtgtgtgacctacaggcttagaaatggtatagtcaaagacattttatccacatttctaatagtggacttgattaagtagataagatcagcatctgtttatggtattaggagaaatagccaaagttgaggattttatgtatgttttcctgtttacctggaaaatagcaattaattggattttttggtaaagattgccttctgtataatgtttggattatataaaattgcaaaaatgataacagcccgctttactgtactaagcctgttactctcatgacgtgtgagcagaatgccttattttgtaatcttgtttaacttgttgctactgggacttgatttactgtggcactagttaagtaagttaaaaaaaagttaaaccctctcattattaaagaggaaaggcgatggtgatgtctgtagtacaatataaaccataattgtgatttaccttaagtaggtataactcttatgggatatacagtatagtttttgtgaatctttacatgatagcattatctttttataattttttttcctaagataaacaaatgcatagttttcttctatgggtgatagaaacagctttttgaagtaatgaaaacctcaaaagatcatgttgattcttaatttttgccttttgcataagcctctttataacatgtatctttaaaacaattaagtctttaggaatgtgtaaccagaactatgttagtattgcttataaaactttagttaggttcaatatatacatatatacatctctatataggtatatagatttgcattttgtcttgtaaaattttatttgaataaattcttcctgtaggtaatgggaaacaaaattaatagttcatatgtcactcatagcatttctatatttgaaagtagcccaatataaaacttttgattctaaaattaaaccagcagcctattacaagcaaaaaaaaaaaaaaaa

SEQ ID NO: 13 - DNA, 3935 bp, Homo sapiens
ggagagccgaaagcggagctcgaaactgactggaaacttcagtggcgcggagactcgccagtttcaaccccggaaacttttctttgcaggaggagaagagaaggggtgcaagcgcccccacttttgctctttttcctcccctcctcctcctctccaattcgcctccccccacttggagcgggcagctgtgaactggccaccccgcgccttcctaagtgctcgccgcggtagccggccgacgcgccagcttccccgggagccgcttgctccgcatccgggcagccgaggggagaggagcccgcgcctcgagtccccgagccgccgcggcttctcgcctttcccggccaccagccccctgccccgggcccgcgtatgaatctcctggaccccttcatgaagatgaccgacgagcaggagaagggcctgtccggcgcccccagccccaccatgtccgaggactccgcgggctcgccctgcccgtcgggctccggctcggacaccgagaacacgcggccccaggagaacacgttccccaagggcgagcccgatctgaagaaggagagcgaggaggacaagttccccgtgtgcatccgcgaggcggtcagccaggtgctcaaaggctacgactggacgctggtgcccatgccggtgcgcgtcaacggctccagcaagaacaagccgcacgtcaagcggcccatgaacgccttcatggtgtgggcgcaggcggcgcgcaggaagctcgcggaccagtacccgcacttgcacaacgccgagctcagcaagacgctgggcaagctctggagacttctgaacgagagcgagaagcggcccttcgtggaggaggcggagcggctgcgcgtgcagcacaagaaggaccacccggattacaagtaccagccgcggcggaggaagtcggtgaagaacgggcaggcggaggcagaggaggccacggagcagacgcacatctcccccaacgccatcttcaaggcgctgcaggccgactcgccacactcctcctccggcatgagcgaggtgcactcccccggcgagcactcggggcaatcccagggcccaccgaccccacccaccacccccaaaaccgacgtgcagccgggcaaggctgacctgaagcgagaggggcgccccttgccagaggggggcagacagccccctatcgacttccgcgacgtggacatcggcgagctgagcagcgacgtcatctccaacatcgagaccttcgatgtcaacgagtttgaccagtacctgccgcccaacggccacccgggggtgccggccacgcacggccaggtcacctacacgggcagctacggcatcagcagcaccgcggccaccccggcgagcgcgggccacgtgtggatgtccaagcagcaggcgccgccgccacccccgcagcagcccccacaggccccgccggccccgcaggcgcccccgcagccgcaggcggcgcccccacagcagccggcggcacccccgcagcagccacaggcgcacacgctgaccacgctgagcagcgagccgggccagtcccagcgaacgcacatcaagacggagcagctgagccccagccactacagcgagcagcagcagcactcgccccaacagatcgcctacagccccttcaacctcccacactacagcccctcctacccgcccatcacccgctcacagtacgactacaccgaccaccagaactccagctcctactacagccacgcggcaggccagggcaccggcctctactccaccttcacctacatgaaccccgctcagcgccccatgtacacccccatcgccgacacctctggggtcccttccatcccgcagacccacagcccccagcactgggaacaacccgtctacacacagctcactcgaccttgaggaggcctcccacgaagggcgaagatggccgagatgatcctaaaaataaccgaagaaagagaggaccaaccagaattccctttggacatttgtgtttttttgtttttttattttgttttgttttttcttcttcttcttcttccttaaagacatttaagctaaaggcaactcgtacccaaatttccaagacacaaacatgacctatccaagcgcattacccacttgtggccaatcagtggccaggccaaccttggctaaatggagcagcgaaatcaacgagaaactggactttttaaaccctcttcagagcaagcgtggaggatgatggagaatcgtgtgatcagtgtgctaaatctctctgcctgtttggactttgtaattatttttttagcagtaattaaagaaaaaagtcctctgtgaggaatattctctattttaaatatttttagtatgtactgtgtatgattcattaccattttgaggggatttatacatatttttagataaaattaaatgctcttatttttccaacagctaaactactcttagttgaacagtgtgccctagcttttcttgcaaccagagtatttttgtacagatttgctttctcttacaaaaagaaaaaaaaaatcctgttgtattaacatttaaaaacagaattgtgttatgtgatcagttttgggggttaactttgcttaattcctcaggctttgcgatttaaggaggagctgccttaaaaaaaaataaaggccttattttgcaattatgggagtaaacaatagtctagagaagcatttggtaagctttatcatatatatattttttaaagaagagaaaaacaccttgagccttaaaacggtgctgctgggaaacatttgcactcttttagtgcatttcctcctgcctttgcttgttcactgcagtcttaagaaagaggtaaaaggcaagcaaaggagatgaaatctgttctgggaatgtttcagcagccaataagtgcccgagcacactgcccccggttgcctgcctgggccccatgtggaaggcagatgcctgctcgctctgtcacctgtgcctctcagaacaccagcagttaaccttcaagacattccacttgctaaaattatttattttgtaaggagaggttttaattaaaacaaaaaaaaattcttttttttttttttttccaattttaccttctttaaaataggttgttggagctttcctcaaagggtatggtcatctgttgttaaattatgttcttaactgtaaccagtttttttttatttatctctttaatctttttttattattaaaagcaagtttctttgtattcctcaccctagatttgtataaatgcctttttgtccatcccttttttctttgttgtttttgttgaaaacaaactggaaacttgtttctttttttgtataaatgagagattgcaaatgtagtgtatcactgagtcatttgcagtgttttctgccacagacctttgggctgccttatattgtgtgtgtgtgtgggtgtgtgtgtgttttgacacaaaaacaatgcaagcatgtgtcatccatatttctctacatcttctcttggagtgagggaggctacctggaggggatcagcccactgacagaccttaatcttaattactgctgtggctagagagtttgaggattgctttttaaaaaagacagcaaacttttttttttatttaaaaaaagatatattaacagttttagaagtcagtagaataaaatcttaaagcactcataatatggcatccttcaatttctgtataaaagcagatctttttaaaaagatacttctgtaacttaagaaacctggcatttaaatcatattttgtctttaggtaaaagctttggtttgtgttcgtgttttgtttgtttcacttgtttccctcccagccccaaaccttttgttctctccgtgaaacttacctttccctttttctttctcttttttttttttgtatattattgtttacaataaatatacattgcattaaaaagaaa

SEQ ID NO: 14 - DNA, 6030 bp, Homo sapiens
gttggcccccgttacttttcctctgggaaatatggcgcacgctgggagaacagggtacgataaccgggagatagtgatgaagtacatccattataagctgtcgcagaggggctacgagtgggatgcgggagatgtgggcgccgcgcccccgggggccgcccccgcgccgggcatcttctcctcgcagcccgggcacacgccccatacagccgcatcccgggacccggtcgccaggacctcgccgctgcagaccccggctgcccccggcgccgccgcggggcctgcgctcagcccggtgccacctgtggtccacctgaccctccgccaggccggcgacgacttctcccgccgctaccgccgcgacttcgccgagatgtccaggcagctgcacctgacgcccttcaccgcgcggggacgctttgccacggtggtggaggagctcttcagggacggggtgaactgggggaggattgtggccttctttgagttcggtggggtcatgtgtgtggagagcgtcaaccgggagatgtcgcccctggtggacaacatcgccctgtggatgactgagtacctgaaccggcacctgcacacctggatccaggataacggaggctgggatgcctttgtggaactgtacggccccagcatgcggcctctgtttgatttctcctggctgtctctgaagactctgctcagtttggccctggtgggagcttgcatcaccctgggtgcctatctgggccacaagtgaagtcaacatgcctgccccaaacaaatatgcaaaaggttcactaaagcagtagaaataatatgcattgtcagtgatgttccatgaaacaaagctgcaggctgtttaagaaaaaataacacacatataaacatcacacacacagacagacacacacacacacaacaattaacagtcttcaggcaaaacgtcgaatcagctatttactgccaaagggaaatatcatttattttttacattattaagaaaaaaagatttatttatttaagacagtcccatcaaaactcctgtctttggaaatccgaccactaattgccaagcaccgcttcgtgtggctccacctggatgttctgtgcctgtaaacatagattcgctttccatgttgttggccggatcaccatctgaagagcagacggatggaaaaaggacctgatcattggggaagctggctttctggctgctggaggctggggagaaggtgttcattcacttgcatttctttgccctgggggctgtgatattaacagagggagggttcctgtggggggaagtccatgcctccctggcctgaagaagagactctttgcatatgactcacatgatgcatacctggtgggaggaaaagagttgggaacttcagatggacctagtacccactgagatttccacgccgaaggacagcgatgggaaaaatgcccttaaatcataggaaagtatttttttaagctaccaattgtgccgagaaaagcattttagcaatttatacaatatcatccagtaccttaagccctgattgtgtatattcatatattttggatacgcaccccccaactcccaatactggctctgtctgagtaagaaacagaatcctctggaacttgaggaagtgaacatttcggtgacttccgcatcaggaaggctagagttacccagagcatcaggccgccacaagtgcctgcttttaggagaccgaagtccgcagaacctgcctgtgtcccagcttggaggcctggtcctggaactgagccggggccctcactggcctcctccagggatgatcaacagggcagtgtggtctccgaatgtctggaagctgatggagctcagaattccactgtcaagaaagagcagtagaggggtgtggctgggcctgtcaccctggggccctccaggtaggcccgttttcacgtggagcatgggagccacgacccttcttaagacatgtatcactgtagagggaaggaacagaggccctgggcccttcctatcagaaggacatggtgaaggctgggaacgtgaggagaggcaatggccacggcccattttggctgtagcacatggcacgttggctgtgtggccttggcccacctgtgagtttaaagcaaggctttaaatgactttggagagggtcacaaatcctaaaagaagcattgaagtgaggtgtcatggattaattgacccctgtctatggaattacatgtaaaacattatcttgtcactgtagtttggttttatttgaaaacctgacaaaaaaaaagttccaggtgtggaatatgggggttatctgtacatcctggggcattaaaaaaaaaatcaatggtggggaactataaagaagtaacaaaagaagtgacatcttcagcaaataaactaggaaatttttttttcttccagtttagaatcagccttgaaacattgatggaataactctgtggcattattgcattatataccatttatctgtattaactttggaatgtactctgttcaatgtttaatgctgtggttgatatttcgaaagctgctttaaaaaaatacatgcatctcagcgtttttttgtttttaattgtatttagttatggcctatacactatttgtgagcaaaggtgatcgttttctgtttgagatttttatctcttgattcttcaaaagcattctgagaaggtgagataagccctgagtctcagctacctaagaaaaacctggatgtcactggccactgaggagctttgtttcaaccaagtcatgtgcatttccacgtcaacagaattgtttattgtgacagttatatctgttgtccctttgaccttgtttcttgaaggtttcctcgtccctgggcaattccgcatttaattcatggtattcaggattacatgcatgtttggttaaacccatgagattcattcagttaaaaatccagatggcaaatgaccagcagattcaaatctatggtggtttgacctttagagagttgctttacgtggcctgtttcaacacagacccacccagagccctcctgccctccttccgcgggggctttctcatggctgtccttcagggtcttcctgaaatgcagtggtgcttacgctccaccaagaaagcaggaaacctgtggtatgaagccagacctccccggcgggcctcagggaacagaatgatcagacctttgaatgattctaatttttaagcaaaatattattttatgaaaggtttacattgtcaaagtgatgaatatggaatatccaatcctgtgctgctatcctgccaaaatcattttaatggagtcagtttgcagtatgctccacgtggtaagatcctccaagctgctttagaagtaacaatgaagaacgtggacgcttttaatataaagcctgttttgtcttctgttgttgttcaaacgggattcacagagtatttgaaaaatgtatatatattaagaggtcacgggggctaattgctggctggctgccttttgctgtggggttttgttacctggttttaataacagtaaatgtgcccagcctcttggccccagaactgtacagtattgtggctgcacttgctctaagagtagttgatgttgcattttccttattgttaaaaacatgttagaagcaatgaatgtatataaaagcctcaactagtcatttttttctcctcttcttttttttcattatatctaattattttgcagttgggcaacagagaaccatccctattttgtattgaagagggattcacatctgcatcttaactgctctttatgaatgaaaaaacagtcctctgtatgtactcctctttacactggccagggtcagagttaaatagagtatatgcactttccaaattggggacaagggctctaaaaaaagccccaaaaggagaagaacatctgagaacctcctcggccctcccagtccctcgctgcacaaatactccgcaagagaggccagaatgacagctgacagggtctatggccatcgggtcgtctccgaagatttggcaggggcagaaaactctggcaggcttaagatttggaataaagtcacagaatcaaggaagcacctcaatttagttcaaacaagacgccaacattctctccacagctcacttacctctctgtgttcagatgtggccttccatttatatgtgatctttgttttattagtaaatgcttatcatctaaagatgtagctctggcccagtgggaaaaattaggaagtgattataaatcgagaggagttataataatcaagattaaatgtaaataatcagggcaatcccaacacatgtctagctttcacctccaggatctattgagtgaacagaattgcaaatagtctctatttgtaattgaacttatcctaaaacaaatagtttataaatgtgaacttaaactctaattaattccaactgtacttttaaggcagtggctgtttttagactttcttatcacttatagttagtaatgtacacctactctatcagagaaaaacaggaaaggctcgaaatacaagccattctaaggaaattagggagtcagttgaaattctattctgatcttattctgtggtgtcttttgcagcccagacaaatgtggttacacactttttaagaaatacaattctacattgtcaagcttatgaaggttccaatcagatctttattgttattcaatttggatctttcagggattttttttttaaattattatgggacaaaggacatttgttggaggggtgggagggaggaacaatttttaaatataaaacattcccaagtttggatcagggagttggaagttttcagaataaccagaactaagggtatgaaggacctgtattggggtcgatgtgatgcctctgcgaagaaccttgtgtgacaaatgagaaacattttgaagtttgtggtacgacctttagattccagagacatcagcatggctcaaagtgcagctccgtttggcagtgcaatggtataaatttcaagctggatatgtctaatgggtatttaaacaataaatgtgcagttttaactaacaggatatttaatgacaaccttctggttggtagggacatctgtttctaaatgtttattatgtacaatacagaaaaaaattttataaaattaagcaatgtgaaactgaattggagagtgataatacaagtcctttagtcttacccagtgaatcattctgttccatgtctttggacaaccatgaccttggacaatcatgaaatatgcatctcactggatgcaaagaaaatcagatggagcatgaatggtactgtaccggttcatctggactgccccagaaaaataacttcaagcaaacatcctatcaacaacaaggttgttctgcataccaagctgagcacagaagatgggaacactggtggaggatggaaaggctcgctcaatcaagaaaattctgagactattaataaataagactgtagtgtagatactgagtaaatccatgcacctaaaccttttggaaaatctgccgtgggccctccagatagctcatttcattaagtttttccctccaaggtagaatttgcaagagtgacagtggattgcatttcttttggggaagctttcttttggtggttttgtttattataccttcttaagttttcaaccaaggtttgcttttgttttgagttactggggttatttttgttttaaataaaaataagtgtacaataagtgtttttgtattgaaagcttttgttatcaagattttcatacttttaccttccatggctctttttaagattgatacttttaagaggtggctgatattctgcaacactgtacacataaaaaatacggtaaggatactttacatggttaaggtaaagtaagtctccagttggccaccattagctataatggcactttgtttgtgttgttggaaaaagtcacattgccattaaactttccttgtctgtctagttaatattgtgaagaaaaataaagtacagtgtgagatactg

SEQ ID NO: 15 - DNA, 4749 bp, Homo sapiens
atggactgggcaagggacccacgttcagaatcacctagcatcaggtccgccaacaggccagaatccactcgcccctcgcttcgtccccctaattcctcgtccccattaccccccttcaccgcctccgttttgcctccggatcgcaaaagtgacccgagctttaaccagtggagagagatcagggaacaattcactgtccctattctcatccatgtgtgggtcggctcaccgtgtggcttgcacggaccttacattttctacaaggcttttcaattccaccttgaaggcaaaccaagaattttgtcccttggcgactttttctttgtaagatgtacgccaaaggatccgatttgcatagcggagctccagctgttgtgggaagagaggaccagccggcaacttttatccagctctaaactttatttcctcccagaagacactccccagggcagaaatagcgaccatggcgaggtgccatttgatgttctagtttgcaattactccacgcaaagtggacgtcctcctgcgcgatctttgggggtgtgtgggacgggggcgggggaggggagggcagaggggtgtgtgctcgcccactggccctgcgggtccagcgttctccgtgcccagacggcgctcccggggagggcggggaggggacagagcctccccggcacgtttctgggcggccgcgggggcgctcgccgcgctcccgggaggacgccggaggtgagcccgctgtcactgggcgccggggcggccgcctcccttcggctctgtcatttcatgtgtgaccgcagttctgcgggctcccctcctcagctgaccgacctcagcgccgtggtacctaccgaggggaactattttggggagtctgtgcccacggcgcagcggggagggagggcgcactgccgcctggcgaggctttgtgttgccaaagcgagagcaggaattcctcggtttgatcgagttgatagtacttttggcattgctagttcactccctctccccaggatcgaattactcgtcagtggtctatgccggttaattactggagttcgtcgaaacgatgaagtcattgctgtttccgaaaaggtgattgtgaagcttgaagacctggtcaagtgggtacattctgatttctccaagtggagatgtggcttccacgctggaccagtgaaaactgaggccttgggaaggaatggacagaaggaagctctgctgaagtacaggcagtcaaccctaaacagtggactcaacttcaaagacgttctcaaggagaaggcagacctgggggaggacgaggaagaaacgaacgtgatagttctcagctacccccagtactgccggtaccgctcgatgctgaaacgcatccaggataagccatcttccattctaacggaccagtttgcattggccctggggggcattgcagtggtcagcaggaaccctcagatcctgtactgtcgggacacctttgaccacccgactctcatagaaaacgagagtatatgcgatgagtttgttcaccaagaacaatctgtgacaaagatctgcttttatcaggacagctgccagattcataccacatctccaggttctgttagacatcacagtaaaaccaccatgcagcccagaggtttggagctttgtcttggaagctccttccatcaatcagaataccaaatttacattgttaggttccctggaggtgttggagctctggattcagcaattattgtgaataagaaccttgcagctagggggctctctaggagagccagtagcccggtgggcttgagagtcttggcaaaacagcttctgtgcatgatctccattgagagaggagcctggggcctggaaatggctcgtggacacctggcatctggagagatgaataggagaaaggagttgccagcgccaaatcttaaaggcagaccacgcaaaaagaaaccatgcccacaaagaagagattcattcagtggtgttaaggattccaacaacaattccgatggcaaagccgttgccaaggtgaaatgtgaggccaggtcagccttgaccaagccgaagaataaccataactgtaaaaaagtctcaaatgaagaaaaaccaaaggttgccattggtgaagagtgcagggcagatgaacaagccttcttggtggcactttataaatacatgaaagaaaggaaaacgccgatagaacgaataccctatttaggttttaaacagattaacctttggactatgtttcaagctgctcaaaaactgggaggatatgaaacaataacagcccgccgtcagtggaaacatatttatgatgaattaggcggtaatcctgggagcaccagcgctgccacttgtacccgcagacattatgaaagattaatcctaccatatgaaagatttattaaaggagaagaagataagcccctgcctccaatcaaacctcggaaacaggagaacagttcacaggaaaatgagaacaaaacaaaagtatctggaaccaaacgcatcaaacatgaaatacctaaaagcaagaaagaaaaagaaaatgccccaaagccccaggatgcagcagaggtttcatcagagcaagaaaaagaacaagagactttaataagccagaaaagcatccctgagcctctcccagcagcagacatgaagaaaaaaatagaagggtatcaggaattttcagcgaagcccctggcatccagagtagacccagagaaggacaacgaaacagaccaaggttccaacagtgagaaggtggcagaggaggcgggagagaaggggcccacacctccactcccaagtgctcctctggccccagaaaaagattcagccttggtccctggggccagcaaacagccactcacctctcctagtgccctggtggactcaaaacaagaatccaaactgtgctgttttacagagagccctgaaagtgaaccccaagaagcatccttccccagcttccccaccacacagccaccgctggcaaaccagaatgagacggaggatgacaaactgcccgccatggcagattacattgccaactgcaccgtgaaggtggaccagctgggcagtgacgacatccacaatgcgctcaagcagaccccaaaggtccttgtggtccagtcgtttgacatgttcaaagacaaagacctgactgggcccatgaacgagaaccatggacttaattacacgcccctgctctactctaggggcaacccaggcatcatgtccccactggccaagaaaaagcttttgtcccaagtgagtggggccagcctctccagcagctacccttatggctccccaccccctttgatcagcaaaaagaaactgattgctagggatgacttgtgttccagtttgtcccagacccaccatggccaaagcactgaccatatggcggtcagccggccatcagtgattcagcacgtccagagtttcagaagcaagccctcggaagagagaaagaccatcaatgacatctttaagcatgagaaactgagtcgatcagatccccaccgctgcagcttctccaagcatcaccttaacccccttgctgactcctacgtcctgaagcaagaaattcaggagggcaaggataaactcttagagaaaagggccctcccccattcccacatgcctagcttcctggctgacttctactcgtcccctcatctccatagcctctacagacacaccgagcaccatcttcataatgaacagacatccaaatacccttccagggacatgtacagggaatcggaaaacagttcttttccttcccacagacaccaagaaaagctccatgtaaattatctcacgtccctgcacctgcaagacaaaaagtcggcggcagcagaagcccctacggatgatcagcctacagatctgagccttcccaagaacccgcacaaacctaccggcaaggtcctgggcctggctcattccaccacagggccccaggagagcaaaggcatctcccagttccaggtcttaggcagccagagtcgagactgtcaccccaaagcctgtcgggtatcacccatgaccatgtcaggccctaaaaaataccctgaatcgctttcaagatcaggaaaacctcaccatgtgagactggagaatttcaggaagatggaaggcatggtccacccaatcctgcaccggaaaatgagcccgcagaacattggggcggcgcggccgatcaagcgcagcctggaggatttggaccttgtgattgcagggaaaaaggcccgggcagtgtctcccttagacccatccaaggaggtctctgggaaggagaaggcctctgagcaggagagtgaaggcagcaaagcagcgcacggtgggcattccgggggcggatcagaaggccacaagcttcccctctcctcccctatcttcccaggtctgtattccgggagcctgtgtaactcgggcctcaactccaggctcccggctgggtattctcattctctgcagtacttgaaaaaccagactgtgctttctccactcatgcagcccctggctttccactcgcttgtgatgcaaagaggaatttttacatcaccgacaaattctcagcagctgtacagacacttggctgcggctacacctgtaggaagttcatatggggaccttttgcataacagcatttaccctttagctgctataaatcctcaagctgcctttccatcttcccagctgtcatccgtgcaccccagtacaaaactgtag

SEQ ID NO: 16 - DNA, 3202 bp, Homo sapiens
atgccgaacttctgcgctgcccccaactgcacgcggaagagcacgcagtccgacttggccttcttcaggttcccgcgggaccctgccagatgccagaagtgggtggagaactgtaggagagcagacttagaagataaaacacctgatcagctaaataaacattatcgattatgtgccaaacattttgagacctctatgatctgtagaactagtccttataggacagttcttcgagataatgcaataccaacaatatttgatcttaccagtcatttgaacaacccacatagtagacacagaaaacgaataaaagaactgagtgaagatgaaatcaggacactgaaacagaaaaaaattgatgaaacttctgagcaggaacaaaaacataaagaaaccaacaatagcaatgctcagaaccccagcgaagaagagggtgaagggcaagatgaggacattttacctctaacccttgaagagaaggaaaacaaagaatacctaaaatctctatttgaaatcttgattctgatgggaaagcaaaacatacctctggatggacatgaggctgatgaaatcccagaaggtctctttactccagataactttcaggcactgctggagtgtcggataaattctggtgaagaggttctgagaaagcggtttgagacaacagcagttaacacgttgttttgttcaaaaacacagcagaggcagatgctagagatctgtgagagctgtattcgagaagaaactctcagggaagtgagagactcacacttcttttccattatcactgacgatgtagtggacatagcaggggaagagcacctacctgtgttggtgaggtttgttgatgaatctcataacctaagagaggaatttataggcttcctgccttatgaagccgatgcagaaattttggctgtgaaatttcacactatgataactgagaagtggggattaaatatggagtattgtcgtggccaggcttacattgtctctagtggattttcttccaaaatgaaagttgttgcttctagacttttagagaaatatccccaagctatctacacactctgctcttcctgtgccttaaatatgtggttggcaaaatcagtacctgttatgggagtatctgttgcattaggaacaattgaggaagtttgttcttttttccatcgatcaccacaactgcttttagaacttgacaacgtaatttctgttctttttcagaacagtaaagaaaggggtaaagaactgaaggaaatctgccattctcagtggacaggcaggcatgatgcttttgaaattttagtggaactcctgcaagcacttgttttatgtttagatggtataaatagtgacacaaatattagatggaataactatatagctggccgagcatttgtactctgcagtgcagtgtcagattttgatttcattgttactattgttgttcttaaaaatgtcctatcttttacaagagcctttgggaaaaacctccaggggcaaacctctgatgtcttctttgcggccggtagcttgactgcagtactgcattcactcaacgaagtgatggaaaatattgaagtttatcatgaattttggtttgaggaagccacaaatttggcaaccaaacttgatattcaaatgaaactccctgggaaattccgcagagctcaccagggtaacttggaatctcagctaacctctgagagttactataaagaaaccctaagtgtcccaacagtggagcacattattcaggaacttaaagatatattctcagaacagcacctcaaagctcttaaatgcttatctctggtaccctcagtcatgggacaactcaaattcaatacgtcggaggaacaccatgctgacatgtatagaagtgacttacccaatcctgacacgctgtcagctgagcttcattgttggagaatcaaatggaaacacagggggaaagatatagagcttccgtccaccatctatgaagccctccacctgcctgacatcaagttttttcctaatgtgtatgcattgctgaaggtcctgtgtattcttcctgtgatgaaggttgagaatgagcggtatgaaaatggacgaaagcgtcttaaagcatatttgaggaacactttgacagaccaaaggtcaagtaacttggctttgcttaacataaattttgatataaaacacgacctggatttaatggtggacacatatattaaactctatacaagtaagtcagagcttcctacagataattccgaaactgtggaaaatacctaagagacttttaaaaataggctttcttatatttgatatttggaagaaaaagccgtaaggtgtatgtagaccacttaatcactaaatatctttgcctataggactccattgaatacattagccattgataatctacctgtttaaatggcccctgtttgaactctcaagctttgaagacctacctgttcttccagaagagaacgttgaaagtgccatgtttccttttgcgtgatctctgttgatggcactctggaattgtttcagttaagtcattttagacatagcatttattatcactgtggatctctacttgttgggtgttatgaattctttgaagaaatatattttgaagaggtgtgggaggaaggaatacattttataaaatgttgtagtgaagcccacaattgacctttgactaataggagttttaagtatgttaaaaatctatactggacagttacaagaaattaccggagaaaagcttgtgagctcaccaaacaaggatttcagtgtagattttgtctttcttgaacttaaagaaacaaatgacaaagtttgaatggaaaagcctgctgttgttccacatctcgttgctgtttacattcctttgtggagcctgcatcttcctaagctttttagcaggtatatgttgaacacttctgtttcatggttgagacagaatcagaggccatggatactgacaactgatttgtctgttttttttctctgtctttttccatgactcttatatactgcctcatcttgatttataagcaaaacctggaaaacctacaaaataagtgttgtggtttatctagaaaaatatggaaaatattgctgttatttttggtgaagaaaatcaattttgtatagtttatttcaatctaaataaaatgtgaattttgttaaaaaaaaaaaa

SEQ ID NO: 17 - DNA, 8688 bp, Homo sapiens
atgggcatgggtgctcgcggcgcggatactgagttccccagagacgcggagtcttttgccccaggggcttattcttgttttctcaatggaacaggtcttcgaatctccccaggaacatctcagccaacagcaaatgcagccattgcccgagaccactcagaactctccctgtgccatcctcttggggaacaggaggatatgtccgtagaagacttcgtggactggggaaagccacgccgggatcgggacgccggagagggtcgcccctccctaggctttttcccgtcgcggcgcccacgtgaccgagagcaggccttcaccagcccgcccctttcggccgctgctgcccacttcccgctcggggtaagtaaaccgccgttttccgcaccgccccaaccccgcccttctcctttccccttgccttcacctccctcgggctctctcgcgccactctccccacccccatatcttccccatcgggccctttgtgcgtacgcgacggagcggggtgtgaagatggcggacgaagaggccgagcaggagaggttgagttgcggcgaaggcggctgcgtcgcggagctgcagcgcctgggcgagcggctccaggagctggagctacagctgcgggagagccgggtaccggccgtggaagcggccaccgactactgtcagcagctgtgccagacactcctagaatatgcagagaaatggaaaacttcagaagatcctttacctttattggaggtatacacagtggctatccaaagttatgttaaagcccgaccttatcttacctctgaatgtgaaaatgtagccttggttctggaacgcttggcattaagctgtgttgaacttttactgtgtctgcctgttgagttatcagataaacagtgggaacaatttcagacactggtgcaggtagctcatgaaaagctgatggagaatggcagctgtgaattgcattttttagctactctagctcaagagactggggtgtggaaaaacccggtactgtgcactattctttcccaggaaccattggataaggataaagtgaatgaatttttagcttttgagggtcccatcttgttggatatgagaattaaacatctaatcaaaacaaatcagttaagtcaagcaactgctctagcaaagctgtgttctgaccatccagagattggcataaaaggtagttttaagcaaacttaccttgtctgtctttgtacatcatcaccaaatggaaagttaatcgaagagatttcagaagttgattgcaaagatgcactggaaatgatctgtaacttagaatctgagggtgatgaaaaaagcgctcttgttttatgtactgcgtttttgtcacgtcagctccaacaaggagatatgtactgcgcttgggaacttactctcttttggagtaaattacaacaaagagtagaaccatctatacaagtgtaccttgagaggtgtcgtcaactttctttgttaacgaaaacagtatatcacattttcttcctgattaaagttattaattcagagactgaaggggctggacttgctacctgtatagaactgtgtgtaaaggctcttcgcttggagtctacagaaaatactgaagtgaaaatatctatttgcaagaccatttcatgtttgttgcctgatgatctggaagttaaacgtgcttgtcaactgagtgaatttcttattgagcctacagtagatgcgtattatgctgtggaaatgttgtataatcagccagaccagaaatatgatgaagagaatcttccaataccaaattctttacgctgtgagctgttacttgtattgaaaactcaatggccctttgatccagaattctgggattggaaaaccttgaaacgacaatgtcttgcattaatgggagaagaagcatccattgtgtcttcaatagatgaactaaatgacagtgaagtatatgaaaaagtggtagactaccaagaagagagtaaagaaacttctatgaatgggctttctggtggagttggtgctaattctggccttcttaaagacattggtgatgaaaagcagaagaagagagagataaaacagttaagagagaggggatttatatctgctcggtttaggaattggcaagcctacatgcagtattgtgtgttgtgtgacaaagaattccttggtcacagaatagtacgacatgctcagaaacattacaaagatggaatttatagttgccccatatgtgcaaagaactttaattctaaagaaacttttgtccctcatgtcacactgcatgttaaacaatctagtaaagagagactagcagctatgaaaccattaagaagattgggaaggcctccaaagatcacaactaccaatgaaaatcagaagactaatactgtggctaaacaggagcagcgacctataaaaaagaatagtctctattcaacagattttatagtgtttaatgacaatgatggttcagatgatgagaatgatgacaaagataaatcctatgagccagaagtgattccagtccagaaaccagtacctgttaatgaatttaattgccctgtaactttttgtaaaaagggctttaagtactttaaaaatttaattgctcatgtgaaggggcataaagataatgaagacgccaagcgctttcttgaaatgcagagcaaaaaagttatttgccagtactgtaggcggcattttgtgagtgttactcatctcaatgatcacttacagatgcactgtggcagtaaaccatatatctgtatacagatgaaatgtaaagctggttttaatagttacgccgagcttttaacccaccgaaaggagcatcaagtctttagagcaaaatgtatgtttcctaaatgtggaagaattttttcggaagcttatttactatatgatcatgaagcacaacattataatacgtacacttgtaagttcacaggttgtggtaaagtttatcgttctcagggtgagctggaaaagcatctggatgatcacagtactcctcctgaaaaagtgctgcctcctgaagcccaacttaattcatctggagattccattcagccttctgaagtgaatcagaacacagcagagaatattgagaaagaaagatctatgcttccttcagaaaataacattgaaaacagcttactagcagatagaagtgatgcttgggataaaagcaaagcagaatcagctgtgaccaaacaagaccagatttctgcctctgagctcaggcaagctaatggaccattgtcaaatggtttggaaaaccctgctactactcctctacttcaatccagtgaagtagctgtgtccattaaggtgtctctcaatcaggggattgaggataactttggaaagcaagaaaactcaactgtggaaggcagtggtgaagcactggtcacagacttacatacgccagttgaagatacttgtaatgatttgtgtcatccaggtttccaggagagaaaagaacaagattgctttaatgatgcccatgttactcagaattctttagtaaattcagaaactctcaaaataggtgaccttaccccacaaaacttagaaagacaagtgaacaacttgatgaccttttctgtgcaaaatcaggcagcatttcaaaacaatttaccaacttccaaatttgaatgtggagataatgttaaaacatcatccaatctttataatttacctcttaagacattagaaagtattgcatttgttccaccgcagtccgacctaagtaattcattaggaactccatcagtgcctccaaaagctccagttcagaaattcagctgccaggtcgagggatgtactcgaacctataattcttcacagagtattgggaaacacatgaagacagcacaccctgaccaatatgctgcatttaaaatgcagcgcaaaagtaaaaaaggtcagaaagctaacaacttaaatacaccaaataatggaaagtttgtttattttttgccatcaccggtgaacagctcaaatccattttttacatcacagaccaaagccaatgggaatcctgcttgttcggcccagttgcagcatgtctcgccacccatttttccagctcatttagcaagtgtgtcaactccattgttgtcctcaatggaaagtgtcataaatccaaatataacttctcaggataaaaatgaacaaggtggtatgttatgttcccaaatggaaaatttacctagtactgccttgccagcacaaatggaagatctaaccaaaacagttctgcctttgaatattgacagtggctcagatcctttccttcctttacctgcagaaagtagttcaatgtctctcttcccttcaccagcagatagtgggactaattctgttttttcccaactggaaaataatacaaatcattattcctcacagattgaaggaaacactaattcctcctttctaaaggggggtaatggtgaaaatgcagtttttccttcacaagtgaatgttgcaaataacttcagtagcaccaatgcccaacagtctgcacctgaaaaagttaaaaaagaccgtgggcggggcccaaatgggaaggaaagaaaacctaagcacaacaaaagggctaaatggcctgcaattatcagagatgggaaatttatctgtagcaggtgttacagggcttttactaatcccagatcactgggtgggcacttatccaagcgatcttactgtaaaccactggatggagccgaaattgctcaagaacttctacagagtaatggacagccttctcttcttgccagcatgattctctccacaaatgcagtaaatttgcagcagccacaacaatctaccttcaatccagaagcatgttttaaagatccatcatttctacagcttcttgctgaaaatcgctcgccagcatttttaccaaatacatttcctcgatctggtgtgactaactttaataccagtgtcagtcaagaaggtagtgaaattattaaacaggctttggaaactgctggcattcccagtacatttgagggtgccgaaatgctttctcatgtttcaacaggttgtgtctctgatgcatcacaagtaaatgcaacggtgatgccaaatccaactgtaccacccctgttgcacactgtatgccatccaaacaccttgctgaccaaccagaataggacgtcaaactccaaaacttcctccattgaggaatgtagcagcttgcctgtttttccaacgaatgacttactactgaagactgttgaaaatggtttgtgctctagttcatttcctaattctggtgggccatcacaaaattttaccagtaacagttctcgtgtttctgttataagtggtcctcagaacacaagatccagtcatttaaataaaaagggaaacagtgcttctaagagaagaaagaaagttgctcctccactaattgcacctaacgcttcccaaaacttggtaacaagtgacttaacaacaatgggactcatagcaaagagtgttgaaatcccaactactaaccttcattcaaatgtaattccaacttgtgaacctcagagtttggtggaaaatctaacacagaaattaaataatgttaacaatcagttatttatgactgatgtaaaagagaatttcaaaaccagtcttgagtcccatacagtgttagcccctttaacattaaaaactgaaaatggtgattcccaaatgatggctttgaattcatgcacaacttcaataaattctgatttgcagatttctgaagacaatgttatacaaaactttgaaaagactcttgaaattattaaaactgctatgaattctcaaatacttgaggtaaaaagtggatctcagggtgctggtgaaacttcacaaaatgctcaaataaattataacattcagcttccttcagtaaacactgtgcaaaataacaaattacccgattcttctccgttttcctcctttataagtgtcatgccaacaaaaagtaacattcctcagtctgaagtatcacataaggaggatcaaatacaggaaattttagaaggcttacagaaattaaaattagaaaatgacctatccactccagcatcccaatgtgtactgataaatacatcagtgacactgactcccacgcctgttaaatcaactgcagatatcacagttattcagccagtttctgaaatgataaacattcaatttaatgacaaagttaataaaccctttgtgtgtcaaaaccaaggctgtaactacagtgctatgacaaaggatgcactatttaagcactatggtaaaattcatcaatacactccagaaatgattcttgaaattaagaagaatcaattgaaatttgctccctttaaatgtgtagtacctacatgtacaaaaacatttacaagaaattctaacctccgggcacactgtcagttggtgcatcattttacaactgaagaaatggtaaagttaaaaattaaaaggccttatggaagaaaatctcagagtgaaaatgtgccggcctcacgaagtacacaagtgaaaaaacagctagctatgacagaggaaaataaaaaggaatctcagcctgctttagaattgagagcagagacccaaaatacccacagtaatgtagcagtgatcccagaaaaacaacttgtagaaaaaaaaagtcctgacaaaacagaaagttctttacaagtgattacagttacttcagaacaatgtaatacaaatgcactcacaaacacacaaaccaaaggacggaagattaggaggcataaaaaagaaaaggaggagaaaaaacgaaagaagccagtttcccaatcccttgagtttccaacaagatacagtccttacagaccttatcgatgtgttcaccagggatgctttgctgcctttacgatacagcaaaacttgattctccattaccaggctgtacacaaatcagatctacctgcattttcagcagaggtcgaagaggaaagtgaagctggtaaagaaagtgaagaaactgaaactaaacaaactttgaaagaatttcgatgtcaggtaagtgactgttctcgaattttccaagcaattactggcctaatacaacactacatgaaacttcatgaaatgactcctgaagaaattgaaagtatgactgcttcagtggatgttgggaagtttccatgtgaccagttagagtgtaaatcttcatttactacatatttgaactatgttgttcatctagaggcagaccacgggattggactaagggcaagtaaaacagaagaagatggtgtatacaaatgtgattgtgaaggctgtgaccgtatatatgcaacccggtcgaatctcctccgacacatttttaataagcataatgacaaacataaggctcatttgattcgtccaagaagattaacaccaggccaggaaaatatgtcaagcaaggcaaaccaagaaaaatcaaagtctaaacatcgggggaccaagcacagcagatgtggaaaggaaggaataaaaatgcccaagaccaaacgaaagaaaaaaaataatttagaaaacaagaatgcaaagattgtgcagattgaagaaaataagccttattctctgaaacgtgggaagcatgtatattctataaaggctagaaatgatgccctgtctgagtgtacaagcagatttgtaacccagtatccatgtatgataaagggatgtacttcagttgttacaagtgaaagcaatataattagacattataagtgccataaattatctaaggcatttacatcacaacaccgaaatcttcttattgtattcaaacggtgttgcaactcacaagtaaaggaaacgtctgagcaagaaggtgctaagaatgatgtgaaagattctgacacgtgtgtatcagagagcaatgataattcaagaacaacagctacagtttcacaaaaggaagttgaaaaaaatgaaaaagatgaaatggatgaactaacagaattgtttattacaaaattaataaatgaagatagcacaagtgtagagacccaagctaatacttcttcaaatgtaagtaatgattttcaggaagataacctctgccagtcagaaagacaaaaagcaagtaatttgaagagagttaataaggaaaaaaatgtctcacaaaataaaaaaaggaaagttgaaaaagctgaaccagcatcagcagctgagttaagtagcgtgcgtaaagaagaagaaactgctgttgccattcaaaccattgaggagcatcctgcatcttttgactggagctcttttaagccaatgggatttgaagtatcatttctgaagtttcttgaggagtctgcagtgaagcagaagaaaaatactgacaaagaccatccgaatactggaaacaaaaaaggatcccattcaaattcaagaaaaaatattgataagactgctgtgactagtggaaatcatgtatgtccttgtaaagaaagcgaaacgtttgtacagtttgccaatccatcacagcttcagtgcagtgataatgtaaaaattgttttagacaagaatcttaaagattgcactgagcttgtcttaaagcaacttcaggaaatgaaacctaccgtcagtctgaaaaaacttgaagtacattcaaatgatccagatatgtctgttatgaaagatatcagtataggtaaagccacaggcagaggtcagtactga

SEQ ID NO: 18 - DNA, 2088 bp, Homo sapiens
ggtccgagttcggaatttcggttcaaggcccagttcctcggattgttcctgcgcaacttcagtttcccttccaggcacgggcaatgagtgtttggccgcgacgagttggaaagcccggatgcgtccttcggttgggcggggtgtctcagtgacgtcactgggggtataaaagggcctgggtggcgggcgcctgggcagagcgtcctagcagtgtcactgcgtgggttggtttgtgtagagaggcgtgagcgagcccgttgtccggagtgcacctgctgcctgttctgtccctcccgggagcccccgccgctgtcgccgtcgagtcgccatggaagtgcagaaagaggcacagcgcatcatgaccctgtcggtgtggaagatgtatcactcccgcatgcagcgcggtggcctgcggctgcaccggagtctgcagctgtcgctggtcatgcgcagcgcccgggagctctacctctcggccaaggtggaggccctcgagcccgaggtgtcgttgccggccgccctcccctctgaccctcgcctgcacccgccccgagaagccgagtccacggccgagacagcgacccccgacggtgagcacccgtttccggagccaatggacacgcaggaggcgccgacagccgaggagacctccgcctgctgtgccccgcgccccgccaaagtcagccgcaaacgacgcagcagcagcctgagcgacggcggggacgctggactggtcccgagcaagaaagcccgtctggaagaaaaggaagaagaggagggagcgtcatccgaagtcgccgatcgcctgcagccccctccggcgcaagcggagggcgcctttcccaacctggcccgcgtcctgcagaggcgcttctccggcctcctgaactgcagccccgcggcccctccgacggcgccgcccgcgtgcgaggcaaagcccgcttgccgcccggcggacagcatgctcaacgtgctcgtgcgggccgtggtggccttctgaggaccccgagcggcgctgccggagcccagagcgcgcgtcgaaccgtcggcccgagggcgcagacctgaggcgaggccacccccctccatcctgggggaagcgcccgcgaaaaccgtggagagaagccgccgcccgggctgctgagaggcccggagagggactctgtccccggggagccatcgccttcagtgtgcagggacggcaccgaggagtctgagccgggggcgcgggcgccttccgcagagacctgcgcccacaggtgctgtcttagtggactgggacgtgaacctttcgctctccttctggactgggagaagggaggcttgggtgttgtgttttttgttttgtttgtttgtttgtttttaaagatctcctcagggtcggacttcattttgtactgtgggctgtgctggccctttcaaggtttttcaagagttggttttgcgtttccaacctcggagaattccaggcactccccttccccctccgctgacatacttgtataagcggtcatcgttgcgtcatggggcaggcgtggggagcttcctgtcgccttgcgtgggtgtggggcctgggaggaggtcctggggcgtgcacccgccctgggcagtggggaggagagtggcctgagttacttcacccccgcgtgctgctggttaatgtcccgcgtctctgcaccttcgggtgggagcggggactgatctactttcacattctcaagtttttctcatctgcattagaggtgcccagtaggttcccaggttccagcgtgcccctccctcagacacacggacacaatcagccgagaagttcctggtctgaatcacgagaatgtggaggggtggggggtgtcagtggaaaggcataaggctgagctgagaccagttgctggtgaaactgggccaatctggggaggggaacatccttgccagggagtttctgagggtctgctttgtttacctttcgtgcggtggattctttttaactccgtctacctggcgttttgttagaaatgtcagataggaaaataaaaaccatttgagtaaaaaaaaaaaaaaaaaaaaaaaaaaaaaaaaaaaaaaaaaaaa

SEQ ID NO: 19 - DNA, 3026 bp, Homo sapiens
tcgacccacgcgtccggattgaggggttgactgagcgttgcgagccttagctttctcccgaacgccagcgctgaggacacgatgtcgcggctctcccgctcactgctttgggccgccacctgcctgggcgtgctctgcgtgctgtccgcggacaagaacacgacccagcacccgaacgtgacgactttagcgcccatctccaacgtaacctcggcgccggtgacgtccctcccgctggtcaccactccggcaccagaaacctgtgaaggtcgaaacagctgcgtttcctgttttaatgttagcgttgttaatactacctgcttttggatagaatgtaaagatgagagctattgttcacataactcaacagttagtgattgtcaagtggggaacacgacagacttctgttccgtttccacggccactccagtgccaacagccaattctacagctaaacccacagttcagccctccccttctacaacttccaagacagttactacatcaggtacaacaaataacactgtgactccaacctcacaacctgtgcgaaagtctacctttgatgcagccagtttcattggaggaattgtcctggtcttgggtgtgcaggctgtaattttctttctttataaattctgcaaatctaaagaacgaaattaccacactctgtaaacagacccattgaattaataaggactggtgattcatttgtgtaactcactgaagccaaaatactatcttttaagatgtcccacatggaagacgctattccaggatctttaaatttccatggatgcatataggatgtttgggagcatcatccgtgaagaaaaaatcaattaaatcattgtgttcaacaggaatatttaaaatattctgcatgaatcctgtggctgtcttattttaaatagctgctgctgtgggattatattttttttccttaacatgccaaatataactttctgaaagtgatggaaaatgttgtcttgtgcagacaacatcatggctcttggcagtttaaatttagtaattttaatttagtgaacagaattgagaagaacgtgccaaatgagaatcaattaggtggatttttggctgtcatttcaaaagtggaataaatttattaatttagtagtactaaatggtatccttagattaaaattttgtgcttgataacagctgttttttctacattagaaataagatgccacacaaggaactacattccagatttaaagaaatgaaaggataccattagtgtgtataacagattattgttcatacttgtaaagcatcttatgtcattgagaatataaagaacagtgccttagaagacagtgaaaggtaagctctagcttaatgtctatgatttgttctttgacattaaggaaggtaaggattggtcagaggatgtaacttgatgtgagcagtagtaaacctgttttagatatcatactgttaatattttattgaaaatttatttcagagcggagaaacttaagctaaagtctgttatacagaattgaaagccttcgtatcttgaacctcccaacatttttcttatggctgttgaaaagtatagagctaaattgatttaattacactttcctttgtactttaaaaaaaagtatgctagcactattgtaccttgaaaggatttccaccagactgtcttgagtagtgacttctttggtgaggcaagaaggatatacattattttagaatcatttactatttaaatgagacaatcatattattttagaatcatttattttaaatgagacaatcattttaagttttaagataacagaagtgaccaatgtaatttcacaacacctaaggattttttggttgatcaggttactgtagatttttactgattgtcctggatgaatagactgtgctttttctttttctctcccttccttcttggtttcccatagtataataagcatgcatactttaacttctatagttttctcctttagagggtcgtcttcagttttagaggtttacttctcccttgcctttgactcattggactagtgcagaggctttaagtagtttaaaatgggcttttgcttttctaggtcattaacgttttttatttagtttctttagccaatagtggctgagtttcgcacttgattttcaatattttatagtaagaaatgacaaactgctttgtttcatttcataaacaaactctgcatttagataactattaaaggttgttaagatgaagatttactgtttctttgttactcgttggtacagctgtttgttttacttgcacatttgtacatatacttaatgttttcaagtgccttaattgtttaaaatctctggcttcaaagtttcttggggaaaggtcggtttacctcacattttttgtttccattagtaatattctaggtacctcacaaaatgtattatggtgccatggctgttagtttttagtgagtgctgtaggattaattcgaaaataggcagaattccattcctcccaaggtggcaaaaattagctatactgatgtaattgtcatttacctgggtatgaattccctgacacacattcatgtcaacatatgtagcaaattttgtgaaaacataacaatttgaagcttctgtaattttgagcactgctctaacaacaagcataatataaaattagttagattttgcaagtctacaaatgagctcttgcaacagaactcacagcctttttacttttttcccctaactttagcaatgtagtatcttgagccattaatttttgggtttttttaaaatccagaaggtatatagaaaccttttcagatttttcatctgatttgttcttgcagatgttcttctatcaaataccttattttaccttacagatatttgttgcacaggcagatactgctgtatttagacatttctatttcagttcattaaaaactgcaaaaccaatctgtatcatgtaccaaactgacttaaaataaatctacatgtttattgaaaaaaaaaaaaaaaaaaaa

SEQ ID NO: 20 - DNA, 10220 bp, Homo sapiens
ggaaactctgaaagaacttagaatcagcattttgagagcagaagcttgggcatgctgtgattttccaataaactgctatcacaatgtcaaaatgcagttcagacaagagcaacacagagatctcaaacattaaaacgtaagctgtgctagaacaaaaatgcaatgaaagaaacactggatgaatgaaaagccctgctttgcaacccctcagcatggcaggcctgcagctcatgacccctgcttcctcaccaatgggtcctttctttggactgccatggcaacaagaagcaattcatgataacatttatacgccaagaaaatatcaggttgaactgcttgaagcagctctggatcataataccatcgtctgtttaaacactggctcagggaagacatttattgcagtactactcactaaagagctgtcctatcagatcaggggagacttcagcagaaatggaaaaaggacggtgttcttggtcaactctgcaaaccaggttgctcaacaagtgtcagctgtcagaactcattcagatctcaaggttggggaatactcaaacctagaagtaaatgcatcttggacaaaagagagatggaaccaagagtttactaagcaccaggttctcattatgacttgctatgtcgccttgaatgttttgaaaaatggttacttatcactgtcagacattaaccttttggtgtttgatgagtgtcatcttgcaatcctagaccacccctatcgagaaattatgaagctctgtgaaaattgtccatcatgtcctcgcattttgggactaactgcttccattttaaatgggaaatgtgatccagaggaattggaagaaaagattcagaaactagagaaaattcttaagagtaatgctgaaactgcaactgacctggtggtcttagacaggtatacttctcagccatgtgagattgtggtggattgtggaccatttactgacagaagtgggctttatgaaagactgctgatggaattagaagaagcacttaattttatcaatgattgtaatatatctgtacattcaaaagaaagagattctactttaatttcgaaacagatactatcagactgtcgtgccgtattggtagttctgggaccctggtgtgcagataaagtagctggaatgatggtaagagaactacagaaatacatcaaacatgagcaagaggagctgcacaggaaatttttattgtttacagacactttcctaaggaaaatacatgcactatgtgaagagcacttctcacctgcctcacttgacctgaaatttgtaactcctaaagtaatcaaactgctcgaaatcttacgcaaatataaaccatatgagcgacagcagtttgaaagcgttgagtggtataataatagaaatcaggataattatgtgtcatggagtgattctgaggatgatgatgaggatgaagaaattgaagaaaaagagaagccagagacaaattttccttctccttttaccaacattttgtgcggaattatttttgtggaaagaagatacacagcagttgtcttaaacagattgataaaggaagctggcaaacaagatccagagctggcttatatcagtagcaatttcataactggacatggcattgggaagaatcagcctcgcaacaaacagatggaagcagaattcagaaaacaggaagaggtacttaggaaatttcgagcacatgagaccaacctgcttattgcaacaagtattgtagaagagggtgttgatataccaaaatgcaacttggtggttcgttttgatttgcccacagaatatcgatcctatgttcaatctaaaggaagagcaagggcacccatctctaattatataatgttagcggatacagacaaaataaaaagttttgaagaagaccttaaaacctacaaagctattgaaaagatcttgagaaacaagtgttccaagtcggttgatactggtgagactgacattgatcctgtcatggatgatgatgacgttttcccaccatatgtgttgaggcctgacgatggtggtccacgagtcacaatcaacacggccattggacacatcaatagatactgtgctagattaccaagtgatccgtttactcatctagctcctaaatgcagaacccgagagttgcctgatggtacattttattcaactctttatctgccaattaactcacctcttcgagcctccattgttggtccaccaatgagctgtgtacgattggctgaaagagttgtagctctcatttgctgtgagaaactgcacaaaattggcgaactggatgaccatttgatgccagttgggaaagagactgttaaatatgaagaggagcttgatttgcatgatgaagaagagaccagtgttccaggaagaccaggttccacgaaacgaaggcagtgctacccaaaagcaattccagagtgtttgagggatagttatcccagacctgatcagccctgttacctgtatgtgataggaatggttttaactacacctttacctgatgaactcaactttagaaggcggaagctctatcctcctgaagataccacaagatgctttggaatactgacggccaaacccatacctcagattccacactttcctgtgtacacacgctctggagaggttaccatatccattgagttgaagaagtctggtttcatgttgtctctacaaatgcttgagttgattacaagacttcaccagtatatattctcacatattcttcggcttgaaaaacctgcactagaatttaaacctacagacgctgattcagcatactgtgttctacctcttaatgttgttaatgactccagcactttggatattgactttaaattcatggaagatattgagaagtctgaagctcgcataggcattcccagtacaaagtatacaaaagaaacaccctttgtttttaaattagaagattaccaagatgccgttatcattccaagatatcgcaattttgatcagcctcatcgattttatgtagctgatgtgtacactgatcttaccccactcagtaaatttccttcccctgagtatgaaacttttgcagaatattataaaacaaagtacaaccttgacctaaccaatctcaaccagccactgctggatgtggaccacacatcttcaagacttaatcttttgacacctcgacatttgaatcagaaggggaaagcgcttcctttaagcagtgctgagaagaggaaagccaaatgggaaagtctgcagaataaacagatactggttccagaactctgtgctatacatccaattccagcatcactgtggagaaaagctgtttgtctccccagcatactttatcgccttcactgccttttgactgcagaggagctaagagcccagactgccagcgatgctggcgtgggagtcagatcacttcctgcggattttagataccctaacttagacttcgggtggaaaaaatctattgacagcaaatctttcatctcaatttctaactcctcttcagctgaaaatgataattactgtaagcacagcacaattgtccctgaaaatgctgcacatcaaggtgctaatagaacctcctctctagaaaatcatgaccaaatgtctgtgaactgcagaacgttgctcagcgagtcccctggtaagctccacgttgaagtttcagcagatcttacagcaattaatggtctttcttacaatcaaaatctcgccaatggcagttatgatttagctaacagagacttttgccaaggaaatcagctaaattactacaagcaggaaatacccgtgcaaccaactacctcatattccattcagaatttatacagttacgagaaccagccccagcccagcgatgaatgtactctcctgagtaataaataccttgatggaaatgctaacaaatctacctcagatggaagtcctgtgatggccgtaatgcctggtacgacagacactattcaagtgctcaagggcaggatggattctgagcagagcccttctattgggtactcctcaaggactcttggccccaatcctggacttattcttcaggctttgactctgtcaaacgctagtgatggatttaacctggagcggcttgaaatgcttggcgactcctttttaaagcatgccatcaccacatatctattttgcacttaccctgatgcgcatgagggccgcctttcatatatgagaagcaaaaaggtcagcaactgtaatctgtatcgccttggaaaaaagaagggactacccagccgcatggtggtgtcaatatttgatccccctgtgaattggcttcctcctggttatgtagtaaatcaagacaaaagcaacacagataaatgggaaaaagatgaaatgacaaaagactgcatgctggcgaatggcaaactggatgaggattacgaggaggaggatgaggaggaggagagcctgatgtggagggctccgaaggaagaggctgactatgaagatgatttcctggagtatgatcaggaacatatcagatttatagataatatgttaatggggtcaggagcttttgtaaagaaaatctctctttctcctttttcaaccactgattctgcatatgaatggaaaatgcccaaaaaatcctccttaggtagtatgccattttcatcagattttgaggattttgactacagctcttgggatgcaatgtgctatctggatcctagcaaagctgttgaagaagatgactttgtggtggggttctggaatccatcagaagaaaactgtggtgttgacacgggaaagcagtccatttcttacgacttgcacactgagcagtgtattgctgacaaaagcatagcggactgtgtggaagccctgctgggctgctatttaaccagctgtggggagagggctgctcagcttttcctctgttcactggggctgaaggtgctcccggtaattaaaaggactgatcgggaaaaggccctgtgccctactcgggagaatttcaacagccaacaaaagaacctttcagtgagctgtgctgctgcttctgtggccagttcacgctcttctgtattgaaagactcggaatatggttgtttgaagattccaccaagatgtatgtttgatcatccagatgcagataaaacactgaatcaccttatatcggggtttgaaaattttgaaaagaaaatcaactacagattcaagaataaggcttaccttctccaggcttttacacatgcctcctaccactacaatactatcactgattgttaccagcgcttagaattcctgggagatgcgattttggactacctcataaccaagcacctttatgaagacccgcggcagcactccccgggggtcctgacagacctgcggtctgccctggtcaacaacaccatctttgcatcgctggctgtaaagtacgactaccacaagtacttcaaagctgtctctcctgagctcttccatgtcattgatgactttgtgcagtttcagcttgagaagaatgaaatgcaaggaatggattctgagcttaggagatctgaggaggatgaagagaaagaagaggatattgaagttccaaaggccatgggggatatttttgagtcgcttgctggtgccatttacatggatagtgggatgtcactggagacagtctggcaggtgtactatcccatgatgcggccactaatagaaaagttttctgcaaatgtaccccgttcccctgtgcgagaattgcttgaaatggaaccagaaactgccaaatttagcccggctgagagaacttacgacgggaaggtcagagtcactgtggaagtagtaggaaaggggaaatttaaaggtgttggtcgaagttacaggattgccaaatctgcagcagcaagaagagccctccgaagcctcaaagctaatcaacctcaggttcccaatagctgaaaccgctttttaaaattcaaaacaagaaacaaaacaaaaaaaattaaggggaaaattatttaaatcggaaaggaagacttaaagttgttagtgagtggaatgaattgaaggcagaatttaaagtttggttgataacaggatagataacagaataaaacatttaacatatgtataaaattttggaactaattgtagttttagttttttgcgcaaacacaatcttatcttctttcctcacttctgctttgtttaaatcacaagagtgctttaatgatgacatttagcaagtgctcaaaataattgacaggttttgtttttttttttttgagtttatgtcagctttgcttagtgttagaaggccatggagcttaaacctccagcagtccctaggatgatgtagattcttctccatctctccgtgtgtgcagtagtgccagtcctgcagtagttgataagctgaatagaaagataaggttttcgagaggagaagtgcgccaatgttgtcttttctttccacgttatactgtgtaaggtgatgttcccggtcgctgttgcacctgatagtaagggacagatttttaatgaacattggctggcatgttggtgaatcacattttagttttctgatgccacatagtcttgcataaaaaagggttcttgccttaaaagtgaaaccttcatggatagtctttaatctctgatctttttggaacaaactgttttacattcctttcattttattatgcattagacgttgagacagcgtgatacttacaactcactagtatagttgtaacttattacaggatcatactaaaatttctgtcatatgtatactgaagacattttaaaaaccagaatatgtagtctacggatattttttatcataaaaatgatctttggctaaacaccccattttactaaagtcctcctgccaggtagttcccactgatggaaatgtttatggcaaataattttgccttctaggctgttgctctaacaaaataaaccttagacatatcacacctaaaatatgctgcagattttataattgattggttacttatttaagaagcaaaacacagcacctttacccttagtctcctcacataaatttcttactatacttttcataatgttgcatgcatatttcacctaccaaagctgtgctgttaatgccgtgaaagtttaacgtttgcgataaactgccgtaattttgatacatctgtgatttaggtcattaatttagataaactagctcattatttccatctttggaaaaggaaaaaaaaaaaaacttctttaggcatttgcctaagtttctttaattagacttgtaggcactcttcacttaaatacctcagttcttcttttcttttgcatgcatttttcccctgtttggtgctatgtttatgtattatgcttgaaattttaatttttttttttttgcactgtaactataatacctcttaatttacctttttaaaagctgtgggtcagtcttgcactcccatcaacataccagtagaggtttgctgcaatttgccccgttaattatgcttgaagtttaagaaagctgagcagaggtgtctcatatttcccagcacatgattctgaacttgatgcttcgtggaatgctgcatttatatgtaagtgacatttgaatactgtccttcctgctttatctgcatcatccacccacagagaaatgcctctgtgcgagtgcaccgacagaaaactgtcagctctgctttctaaggaaccctgagtgaggggggtattaagcttctccagtgttttttgttgtctccaatcttaaacttaaattgagatctaaattattaaacgagtttttgagcaaattaggtgacttgttttaaaaatatttaattccgatttggaaccttagatgtctatttgattttttaaaaaaccttaatgtaagatatgaccagttaaaacaaagcaattcttgaattatataactgtaaaagtgtgcagttaacaaggctggatgtgaattttattctgagggtgatttgtgatcaagtttaatcacaaatctcttaatatttataaactacctgatgccaggagcttagggctttgcattgtgtctaatacattgatcccagtgttacgggattctcttgattcctggcaccaaaatcagattgttttcacagttatgattcccagtgggagaaaaatgcctcaatatatttgtaaccttaagaagagtatttttttgttaatactaagatgttcaaacttagacatgattaggtcatacattctcaggggttcaaatttccttctaccattcaaatgttttatcaacagcaaacttcagccgtttcactttttgttggagaaaaatagtagattttaatttgactcacagtttgaagcattctgtgatcccctggttactgagttaaaaaataaaaaagtacgagttagacatatgaaatggttatgaacgcttttgtgctgctgatttttaatgctgtaaagttttcctgtgtttagcttgttgaaatgttttgcatctgtcaattaaggaaaaaaaaaatcactctatgttgccccactttagagccctgtgtgccaccctgtgttcctgtgattgcaatgtgagaccgaatgtaatatggaaaacctaccagtggggtgtggttgtgccctgagcacgtgtgtaaaggactggggaggcgtgtcttgaaaaagcaactgcagaaattccttatgatgattgtgtgcaagttagttaacatgaaccttcatttgtaaattttttaaaatttcttttataatatgctttccgcagtcctaactatgctgcgttttataatagctttttcccttctgttctgttcatgtagcacagataagcattgcacttggtaccatgctttacctcatttcaagaaaatatgcttaacagagaggaaaaaaatgtggtttggccttgctgctgttttgatttatggaatttgaaaaagataattataatgcctgcaatgtgtcatatactcgcacaacttaaataggtcatttttgtctgtggcatttttactgtttgtgaaagtatgaaacagatttgttaactgaactcttaattatgtttttaaaatgtttgttatatttcttttcttttttcttttatattacgtgaagtgatgaaatttagaatgacctctaacactcctgtaattgtcttttaaaatactgatatttttatttgttaataatactttgccctcagaaagattctgataccctgccttgacaacatgaaacttgaggctgctttggttcatgaatccaggtgttcccccggcagtcggcttcttcagtcgctccctggaggcaggtgggcactgcagaggatcactggaatccagatcgagcgcagttcatgcacaaggccccgttgatttaaaatattggatcttgctccgttagggtgcctaatccctttacacaagattgaagccaccaaactgagaccttgatacctttttttaactgcatctgaaattatgttaagagtctttaacccatttgcattatctgcagaagagaaactcatgtcatgtttattacctatatggttgttttaattacatttgaataattatatttttccaaccactgattacttttcaggaatttaattatttccagataaatttctttattttatattgtacatgaaaagttttaaagatatgtttaagaccaagactattaaaatgatttttaaagttgttggagacgccaatagcaatatctaggaaatttgcattgagaccattgtattttccactagcagtgaaaatgatttttcacaactaacttgtaaatatattttaatcattacttctttttttctagtccatttttatttggacatcaaccacagacaatttaaattttatagatgcactaagaattcactgcagcagcaggttacatagcaaaaatgcaaaggtgaacaggaagtaaatttctggcttttctgctgtaaatagtgaaggaaaattactaaaatcaagtaaaactaatgcatattatttgattgacaataaaatatttaccatcacatgctgcagctgttttttaaggaacatgatgtcattcattcatacagtaatcatgctgcagaaatttgcagtctgcaccttatggatcacaattacctttagttgttttttttgtaataattgtagccaagtaaatctccaataaagttatcgtctgttc

SEQ ID NO: 21 - DNA, 1783 bp, Homo sapiens
cctctcggagctggaaatgcagctattgagatcttcgaatgctgcggagctggaggcggaggcagctggggaggtccgagcgatgtgaccaggccgccatcgctcgtctcttcctctctcctgccgcctcctgtgtcgaaaataacttttttagtctaaagaaagaaagacaaaagtagtcgtccgcccctcacgccctctcttcctctcagccttccgcccggtgaggaagcccggggtggctgctccgccgtcggggccgcgccgccgagccccagcgccccgggccgcccccgcacgccgcccccatgcatcccttctacacccgggccgccaccatgataggcgagatcgccgccgccgtgtccttcatctccaagtttctccgcaccaaggggctgacgagcgagcgacagctgcagaccttcagccagagcctgcaggagctgctggcagaacattataaacatcactggttcccagaaaagccatgcaagggatcgggttaccgttgtattcgcatcaaccataaaatggatcctctgattggacaggcagcacagcggattggactgagcagtcaggagctgttcaggcttctcccaagtgaactcacactctgggttgacccctatgaagtgtcctacagaattggagaggatggctccatctgtgtgctgtatgaagcctcaccagcaggaggtagcactcaaaacagcaccaacgtgcaaatggtagacagccgaatcagctgtaaggaggaacttctcttgggcagaacgagcccttccaaaaactacaatatgatgactgtatcaggttaagatatagtctgtggatggatcatctgatgatgatccataaatttgatttttgctttgggtgggctcctcttggggatggattatggaatttaaaccatgtcacagctgtgaagatctggcacaagatagaatggtaaaaaaaaaaaaaaattttaagtgacagtgccatagtttggacagtacctttcaatgattaattttaatagcctgtgagtccaagtaaatgatcactttatttgctagggagggaagtcctagggtggtttcagtttctcccagacatacctaaatttttacatcaatccttttaaagaaaatctgtatttcaaagaatctttctctgcagtaaatctcgcaggggaatttgcactattacacttgaaagttgttattgttaaccttttcggcagcttttaataggaaagttaaacgttttaaacatggtagtactggaaattttacaagacttttacctagcacttaaatatgtataaatgtacataaagacaaactagtaagcatgacctggggaaatggtcagaccttgtattgtgtttttggccttgaaagtagcaagtgaccagaatctgccatggcaacaggctttaaaaaagacccttaaaaagacactgtctcaactgtggtgttagcaccagccagctctctgtacatttgctagcttgtagttttctaagactgagtaaacttcttatttttagaaagtggaggtctggtttgtaactttccttgtacttaattgggtaaaagtcttttccacaaaccaccatctattttgtgaactttgttagtcatcttttatttggtaaattatgaactggtgtaaatttgtacagttcatgtatattgattgtggcaaagttgtacagatttctatattttggatgagaaatttttcttctctctataataaatcgtttcttatcttggcatttttaacc

SEQ ID NO: 22 - DNA, 961 bp, Homo sapiens
ggacaatttgtgggccatttaattcagggcccccaattcgtacgtggagaagtgggaatgcaaaagtactttgacctttaaccttcggtccggcgcggtggagggaaacgcctccgtctctatataaggaattttccggtctcttcgggtcctttttcctctcttcagcgtggggcgcccacaatttgcgcgctctctttctgctgctccccagctctcggatacagccgacaccatgggtttcggagacctgaaaagccctgccggcctccaggtgctcaacgattacctggcggacaagagctacatcgaggggtatgtgccatcacaagcagatgtggcagtatttgaagccgtgtccagcccaccgcctgccgacttgtgtcatgccctacgttggtataatcacatcaagtcttacgaaaaggaaaaggccagcctgccaggagtgaagaaagctttgggcaaatatggtcctgccgatgtggaagacactacaggaagtggagctacagatagtaaagatgatgatgacattgacctctttggatctgatgatgaggaggaaagtgaagaagcaaagaggctaagggaagaacgtcttgcacaatatgaatcaaagaaagccaaaaaacctgcacttgttgccaagtcttccatcttactagatgtgaaaccttgggatgatgagacagatatggcgaaattagaggagtgcgtcagaagcattcaagcagacggcttagtctggggctcatctaaactagttccagtgggatacggaattaagaaacttcaaatacagtgtgtagttgaagatgataaagttggaacagatatgctggaggagcagatcactgcttttgaggactatgtgcagtccatggatgtggctgctttcaacaagatctaaaatccatcctggatcatggcatttaaataaaagattgaaagattaaaa

SEQ ID NO: 23 - DNA, 6950 bp, Homo sapiens
ggccaaaggtcaagatacttctctgggaaatgttgctgctgatgctgctttacaaagtcatacaatgagtgtttggtttaagaaagattttcatacttaaaagattttcatcttggaaatacatcaagtgaaaattaaattcttttgggaaacattttccttctgatatattatacttgtaatgggcgacatggcaaacaactcagttgcttacagtggtgtgaaaaactctttgaaggaagctaatcatgatggagactttggaattacgctcgcagagctgcgggctctcatggagctcaggtccacagatgcattacgaaaaatacaggaaagctatggagatgtctatggaatttgcaccaaattgaaaacatctcccaatgaaggtttaagtggaaaccctgcagatttagaaagaagagaagcagtgtttggaaagaattttatacctcctaaaaagccaaaaacctttcttcaattagtatgggaagcattacaagatgtcactttaattatattagaaattgcagccatagtatcattgggcctttctttttatcagcctccagaaggggataatgcactttgtggagaagtttctgttggggaggaagaaggtgaaggtgaaactggttggattgaaggagctgcaatcctcttgtctgtagtgtgtgtggtgttagtaacagctttcaatgactggagtaaggaaaaacagtttagaggtttgcagagccgaattgaacaagaacagaagttcactgtcatcaggggtggtcaggtcattcagatacctgtagctgacattactgttggagatattgctcaagtgaaatatggtgatcttcttccagctgacggcatacttattcaaggcaacgatcttaaaattgatgaaagctcattgactggtgaatcagatcatgttaaaaagtctttagataaggatcccttacttctatcaggtactcatgtaatggaaggctctggaagaatggtagttacagctgtaggtgtaaattctcaaactggaattatctttaccttacttggagctggaggtgaagaggaagagaagaaagatgagaagaaaaaggaaaagaaaaataagaaacaagatggagctattgagaatcgcaacaaagcaaaagcccaggatggtgcagccatggaaatgcagccattgaagagtgaagaaggtggagatggtgatgaaaaagataaaaagaaagcaaatttgccaaaaaaggaaaaatctgttttacaagggaaacttacaaaactggctgttcagattggcaaagcaggtctgttgatgtctgccatcacagttatcattctagtattatattttgtcattgacaccttctgggttcagaaaagaccatggcttgctgagtgcacaccaatttatatacaatactttgtgaagttcttcattattggagttacagttttagtggtcgcagtgccagaaggtcttccacttgcagtcacgatctcactggcttattcagtcaaaaaaatgatgaaagataataacttagtaaggcatctggatgcttgtgaaaccatgggaaatgctacagctatttgttcagataaaacaggaactttgacaatgaacagaatgacagtcgttcaagcttacataaatgaaaaacattataaaaaggttcctgaaccagaagctattccaccaaatattttgtcctatcttgtaacaggaatttctgtgaattgtgcttatacatcaaaaatattgccaccagagaaagagggtggattacctcgtcacgttggtaataaaactgaatgtgccttgttgggacttcttttggatttaaaacgggattatcaggatgttagaaatgaaataccagaagaagcactgtacaaagtctacaccttcaattctgttaggaagtccatgagtactgtcctgaaaaattcagatggaagttatcgaatattcagcaagggtgcatctgagataattctgaaaaagtgtttcaaaatcttgagtgctaatggtgaggcaaaagtattcagaccaagggaccgtgatgatattgtaaaaactgtgattgaaccgatggcatcagaaggcttgagaaccatatgtcttgcattcagagattttccagcaggagaaccagaaccagagtgggataatgaaaatgatattgtcaccggccttacatgcattgctgttgtggggattgaagatcctgtgagacctgaggtgccagatgcaattaaaaagtgtcagagggctggaattactgtgcggatggtcactggtgataatattaatactgctcgggccattgctaccaaatgtggtattttacatcctggggaagattttctgtgcctagaaggtaaagattttaacagaagaatacgaaatgaaaaaggagagattgagcaagagaggatagacaagatttggccaaaacttcgagtacttgcaagatcatctcctactgataagcatacactggttaaaggtataattgacagcactgtctcagaccaacgccaggttgtagctgtaactggtgatggtacaaatgatggcccagcactaaagaaagcagatgttggatttgcaatgggtattgctggaactgatgtagctaaagaagcatccgatattattctcacagatgacaactttacaagcattgttaaagcagttatgtggggacgaaatgtctatgacagcatctcaaaattccttcagttccaacttactgttaatgtagtagcagtgattgttgcttttacgggcgcctgcattactcaagactcaccgcttaaggctgtgcagatgctgtgggtaaacctcataatggatacactcgcttccctggctctggcaacggaaccacccactgagtctctcttgcttcggaaaccttatggtagaaataagcctctcatctcacgtacaatgatgaagaatattttgggtcatgcattctatcaacttgtagtagtctttacactcttatttgctggagaaaagttttttgacattgatagtggaagaaatgctcctttgcatgctcctccttcagaacattatactattgtttttaatacctttgtgctgatgcaacttttcaacgaaataaatgcccggaaaattcatggtgaaagaaatgtattcgaaggaatctttaacaatgccatcttctgcacaattgttttaggcacttttgtggtacagataataattgtgcagtttggtggaaaacctttcagttgttcagaactttcaatagaacagtggctatggtcaatattcctaggaatgggaacattactctggggccagcttatttcaacaattccaactagccgtttaaaattcctcaaagaagctggtcatggaacacaaaaggaagaaatacctgaggaggaattagcagaggatgttgaagagattgatcacgctgaaagggagttgcggcgtggccaaatcttgtggtttagaggtctgaacagaatccaaacacagatggatgtagtgaatgctttccagagtggaagttccattcagggggctctaaggcggcaaccctccatcgccagccagcatcatgatgtaacaaatatttctacccctacacatgtagtgttttcctcttctactgcttctactactgtggggtattcgagtggtgaatgcatttcgtagttctttatatgaagggttagaaaaaccggaatcaagaagttcgattcacaactttatgacacatcctgagtttaggatagaagattcagagcctcatatcccccttattgatgacactgatgccgaagatgatgctcctacaaaacgtaactccagtcctccaccctctcccaacaaaaataacaatgctgttgacagtggaattcaccttacaatagaaatgaacaagtctgctacctcttcatccccaggaagcccactacatagtttggaaacatcactctgattgtaagctgaatgttaacacactagctgcattgtaaagaaacaaattgaaactgggtcttttcacatattgtgatggacaagctagtattcttgtctttggacttcaacagaagacacacttgtacgaatgtagatttatttttttaaaaaaaaaaaagcaaagctttctgccagactgagggtgctttttggggggtgggagaaatgaactgacagataaacagtaactcagcgtaagtgacctgtggatcatcagtagtacccaagcatggtcctgaacagtgtattagcagagctttagtttatctcagtcctggatgggagagagagggaggagtaaaactgggcaagacaaagagccctggatcgttgaattgatagtttaatttctgctgttggctgttaataatttggattatttatgtttataaatgatacagatctgtttacaaggtttgtagatactttttttgttcctgttcatagatgggaagcttccttataactgatgcagagaaaaattagtccttcaaatactgctgtattttcaggaaaaaaaaaaaaaggggtgtttctattgaaactgtactaaatttttgcctacaatttaccttgttaaatattgtagataaattgctaatactaatagccaaatagataacactaatgctttgtttaaaaaaacgaaaaaaacaaaacaaaacaaaaaaacatgagcagtggtgttctaatgaagttatgacatctgtcctaattagtttcttaaatacatttactacttaatggttttgaagcaactgtttaatttttaaaatttttgaaaacttgctaataaccttttgttcagaatttagtagattgtttaatgcaggacatcaactacataatgaaagatgcttgaaatgcttttgttatttcaggcaaatcaaattaaatcagactatcaaactacaagagaaccttagtcttttttgtttttgtctaaacatgttagtttagtgatgtcttggtgaactgtgagtgaactgtattgatttttctaatctttagagaccttcacacagcatgagggctgttggcattttgaaaaaggttaataagtagaagcatacatgttttccttttgtttttgaaacttgtttgtaaacataaataaatatgcccttttattaaataaattcatggcaatgtttttttaaaagacatttcagcttctttactcagttctgcatatacagtgcatcagtctgttctctttgaccacaattggaatacatttcaagatggtaacagccccatgaagtaccgctttaattccttgctggtaatctaatagaatcagattaagaaaattaacacaattttaccatttgacatactcttcattgaatttagtttgtctaaaatagtctcacaggtaaaaaacataacaacaatgaccaccattgtctttgatacatttattttaattcttaagtggccaaataacagattaggtaaaatgagattacatgaaaaggttctaaaatgatatatttagatgcaataattaaccatatgctagaatgcccacctctaagccaattggattctttagctctctttttctttccttcatctaccttcttctcttttttgcctctgtctttaccctttagaaactggcatgtgttagggcccagatttcaccagatacacaatcctcaggctgacataaagtttacgaggactgctactataactgagagtgctgaccaagcaaagaaacatttagttgatggtgcttgatatttttggtgggtgggggaaatctttttctcaccatcaaatctttgcagtaatcctctgcaggtcttagaaacacattggctctgtcagcatttgtaattgtacatttattcatcaggtatttatagtgaatcatactgtaaaaaagaggtagcatgatatgctggaaagcatattagactaggagtcaagacctggtttctagtcttggttttgccattaatgtgctgcatgatcttgggaaaatcatttaccctaaataagggtggtggactatcttgaagaaccctttcaactctaaaaattgaccctatcaactggagagcccacaaggcatagggaatagagaaaagggaaatgttttcagttttcttttttattttggttatgcttaaatatgaatgtaattaccaaaagatttagaagtgcatgtgctttggaggatttgtattgagcttttacagtattcatttttcaactcaaggcaatggctttctacaccaactctaatccataaacgggtcttatgacatctatgaagtagtagcaagacatgcttagtgtgtatttctctctttgagacactgtaatttctaccagaaatttccagagcattatgtaggtagaaaaaaatgcaagcaagctgttaaagatcttggatcccattatatagtatgtatagctgaaatctgtaattcaatcactttttctcttttatcctctaaccaaaaaattgtttaattttgcatcccaaatgtttttaatctttgtatattttttaaaaatccttttctcctcatcattgccttttttgtggttgtaaatagacttacttgcactttgaagatgagttactccttgtcatcttacaaatatgtgatatggtaattttcataacagatgtcagttttgaaccaagaattggtgatttgtttataagaaaaaaactggcttcatttctgtgaaattgctctttgaaaatttctttttacacgtgtaagccaactgagataccgtgatggtgttgatttctttcaatgatgcttaccatctattttagccactgagccttttattatttgtctatttgtaaagtttatttgtcttaactcatttaataaatatactgtttatctgtttctgaaaaaaaaaaaaaaaaaaa

SEQ ID NO: 24 - DNA, 6019 bp, Homo sapiens
gacctcccacaactggagcagccgggaacagctctgaccacagtggttccggggagaagcctttccaggacccatgtgtaggcacaactgttttccctgatcaggatacttgcggcactcaacagaggaaagaaattcctaagggaacactgctcagaaagtactgcagcatgtcttcaaatgcctgaggatcaagttggaaaactagaagcaacagaaaacacaataagcgcaatggcggcggccgcggcggagcagcaacagttctacctgctcctgggaaacctgctcagccccgacaatgtggtccggaaacaggcagaggaaacctatgagaatatcccaggccagtcaaagatcacattcctcttacaagccatcagaaatacaacagctgctgaagaggctagacaaatggccgccgttctcctaagacgtctcttgtcctctgcatttgatgaagtctatccagcacttccctctgatgttcagactgccatcaagagtgagctactcatgattattcagatggaaacacaatctagcatgaggaaaaaagtttgtgatattgcggcagaactggccaggaatttaatagatgaggatggcaataaccagtggcccgaaggtttgaagttcctttttgattcagtcagctctcaaaatgtgggactgcgggaagctgcccttcacattttctggaactttcctggaatttttgggaaccagcaacaacactatttagatgtcatcaaacgaatgttagttcagtgtatgcaagatcaggaacacccgtcgatcaggacgttatctgctagagctacagctgcatttatacttgcaaatgagcataatgttgctctgttcaaacattttgcagacttgctaccgggattcctacaggcggtaaatgactcgtgctaccagaatgatgattctgtcctaaaatccctcgttgagattgcagatactgttccaaagtatttgcgtcctcacttggaagcaactctacagctaagtctaaagttgtgtggagacactagcctcaacaatatgcaacgccagcttgcccttgaagtgatcgtcaccctctctgagactgcagctgctatgttaagaaaacataccaatattgttgcacagactattcctcagatgttagcaatgatggttgatttggaagaagatgaggactgggcaaatgcagatgaactagaagatgatgattttgacagcaatgcagttgcaggcgagagtgctctagatcgaatggcttgcggacttggtggaaagctcgttctgccgatgatcaaggaacacattatgcaaatgcttcaaaatcctgactggaaataccggcatgcaggattgatggccttatctgccattggtgaagggtgccaccagcaaatggaaggaattctaaatgagatcgtaaattttgttttactttttctccaggatcctcatccaagagtaaggtatgcagcctgtaatgccgtgggacagatggctacagattttgcacctggtttccaaaagaaatttcatgagaaggtgattgcagctctgctgcagaccatggaagaccaaggcaatcaacgtgtgcaggcccatgcagctgctgccctcattaactttactgaagactgtcccaagtcactacttattccatacttggataatttggtgaaacatctgcattccattatggtactgaagcttcaagagctgattcagaaaggcaccaagttagttttggaacaagttgtgacatccattgcatcagttgccgatactgcagaagaaaaatttgtcccctactatgatttatttatgccatcactgaagcacatcgttgagaatgcggttcaaaaagaactgagacttctgagaggaaaaactattgaatgcattagcctcattggtctggctgttgggaaggaaaaattcatgcaggatgcatcagatgtgatgcagcttttgttaaagacccagacagacttcaatgatatggaagatgatgatcctcagatctcttacatgatctcagcatgggccagaatgtgcaaaatccttggaaaagaatttcagcaataccttccagtggttatggggcctttaatgaagacggcttcaattaagcccgaagtagcccttttagatacccaagacatggagaatatgagtgatgatgatggttgggaatttgtgaaccttggagatcagcaaagctttggtattaaaactgcaggactagaagaaaaatcaactgcttgccagatgttggtttgctatgctaaggagttaaaggaaggctttgtggagtacaccgaacaggttgtcaaactgatggtccctttactgaaattttatttccacgatggtgttcgagtggcagcagcggaatccatgcctcttctcctggagtgtgcaagagtccgtggtcctgagtatctcacacagatgtggcattttatgtgtgatgctctaattaaggccattggtacagaaccagattcagacgtcctctcagaaataatgcattcttttgcaaagtgcattgaagtaatgggagatggatgccttaataatgaacactttgaagaactgggaggtatattgaaagcaaagcttgaagaacattttaaaaatcaagaattacgacaagttaaaagacaagatgaagactatgatgaacaggtcgaagagtcactacaagatgaggatgataatgatgtttatattctgaccaaagtgtcagatattttacactcaatattcagtagctacaaagaaaaggtgttaccatggtttgaacagctgcttccattaattgtcaacctcatttgtccacatagaccatggccagacagacaatggggattatgcatctttgatgatgtcatagaacactgtagtccagcctcatttaaatacgcagaatatttcttaagaccaatgctccaatatgtatgtgacaacagcccagaagtcaggcaagcagctgcatatggcctgggagtcatggcacagtacggtggagataattatcgccctttttgtacagaagcacttcccctgctggtaagagttattcagtctgcggattctaagaccaaagaaaatgtcaatgctacagagaactgcatctcagcagtagggaaaatcatgaagttcaagcctgactgtgtaaacgttgaagaggtccttccacactggttgtcttggcttccactacatgaagataaagaagaagctgttcagactttcaattatctgtgtgacctgattgaaagtaatcatccaattgttcttggcccaaacaataccaatctgcccaaaatatttagtataattgcggaaggagaaatgcacgaggcaattaaacatgaagatccttgtgccaaacgtctggccaatgtcgttcgccaagtacagacttctggaggactgtggactgagtgcatagcacagctcagtcctgagcagcaggccgccattcaggagctcctgaactctgcgtgaagggccttaatgtcacccaccagaaaactaactccaaataaacgcttaccctttcctttaggtttctttgttttgtttttgagcaaaagagatcggtagtgttgtgtgtaggccattcttctggagagccacaagcaggaagagcagcgctgtgttgcagaatggagtttccatggatttctaccagaccactgaaggagttcctggaagccctgcggtagctagcactgaagactatttttctattggtataacccgcccacctgaaggggaaagggaaatcaaattaatttttctcgttagacataaggaaatttaaggaaaaacagctttaagaacagttactcagcgtagatgtgtgttcacacaaattgctctgcattcagtgttcattgtgaattgggagtgtgagtctttctgtagggtagaaagaagcctcctacccagcaaaccagtagacccaaaagttgaaaaaaactgatgacagacaacaagcatgaagatggcatatttgatgtcactttggttctttttcccagaaggcttatacagtgactcagtcgggaagctttccagcttccagcccttgaatgtgaagtgtcattggcatgtctggcagtagtctctcattcactcctcaataaacaacattgaatacaaaagaggcttgtgtaaaaactcagtactgtctggcttggattcatttcatgtttttaatataagaatgatctaatatttttttaaagtaatagctatcagtaatagctgagtgttttttcccctaatattttccttgtgcaattcagacttaagcatcgagtttttaccatcttccactttaagctaagttatgatacctattccattcacaattggtgttctttttaaggtttgcaaatttcagccaattttgtagctaagattgttctgatcagctcaaaaagatttggcttagtgttttcattgcaaattataattgctgtagagccacacacaacttttgaacttttaattataagtgttatggctaaagttatttactgaaaatttcagtaaaatgtgtgaatgtttctttatgtattaacctcatagcagtaaatgacttgctgttgtttaatttttctaaggcatcttaatagacttctgttgaaaacttcagtgttaacatttttatagtttgtactaaatttaaccgtgatataaaaatgaattttatgcatagatcagaattttaaattaaaggttttttctttaaatgatttgtattactttattaaaactaaatctgaaatggaatagaaaatagaatggattacatacagatggtttccttgttagcagatgcccttcaaatatattttacgtttgcagcacaacaccattgcccggaggcttccgaatctagcaaagcagcatattaaatgactccacctgcgcagtccttgtgttcagtggatgaatacctgtgggctcttgtaatgtgtggtaatatttggagctttatagcctgtattccttgggagaaaaaaatgggaattggagtaaaaagtgtgtcaagacaacccctttctgctttcttatgtagcatctgcaaagccgattcatgtactgatgccaatcagctagagcaatgtaggctttttttaatttaaattattactacactttattactacacttgcagaaaagaaacatgttaaaatcatggcacacctgcagaatttcagatgacagtgtggtcagaagatgttttttgggagaacctagtgtttgctgggcactatgctaagcactttgggagcaagaacctcctaccttccagtttaaacactagtggtattgtcagatgccgttagtatctgagatgtacttacagcagggttctaagagctctgaaagaagcgctctgttagatgcagactggcagcatcctccttgataaaagcagaaaagcaaagaggtaattggagttgaatcaagttaatagggaaggttggtagtaaatgctgttagtgtgacatgattctgaaacccagagctcagaactaactgtgagatgtaccatgaactaacaattctttgaaaggacctgcagaagcatttttaatacctcattctgtctatgcaagatgaaaatccatggagttttttcttggcttttgtaccaaatttaggggtcttgcatgtcagcaagtgatatatattgtttataaatgcaagctatttctggaggggaaaaatgtgtgtggctcttacgttttctgggaattttgtaacaagttacacgcacaagtgttagaaactttggcataactcaatttggagtattttttaaatgctgtatctttaaagaaaagtaaaattgtcttaaatctaattgacacttctgtaatgagaggcaaccttataactctggagttgtagtttgacagaaccatcagtaaagacataagcaaataaatggtcttggtgcaaaaaaaaaaaaaaaaaa

SEQ ID NO: 25 - DNA, 1594 bp, Homo sapiens
atcccggacttcccagagcctgcctggagcgcgtactcagcggctctcgggtcccagcgtcccagccgcggcccgcgctcctccgccccgctcctcctcctcctcttcctcctcctcctcctctctaggcacccccgtcccctccttccagcggctgcagcccccagccccaactctccgcgcttactcctgggacgcgcgtcctcgccccatcctttgcttccttccttccttccttcttccttcctcccctggctcccgccctccctctccaggtcgccctcccggggcccgattgtctcggttccccgctgccggcccgcgccctgccccgtctctcccttgcacttcctgagtcgcccgccgccgccgtcgcagactcgccgcgggagccccagcccaacccgagcccgacagccactgccccggctccagctccagccccacagcccgcggcgcccgcccgagggagccccggcgcccggggaaggctccagtgggctagcgcgccctcgcccagccccgcgccccagccctgcccggcccggcgaggaaggaccgggaagatgaacaacggcggcaaagccgagaaggagaacaccccgagcgaggccaaccttcaggaggaggaggtccggaccctatttgtcagtggccttcctctggatatcaaacctcgggagctctatctgcttttcagaccatttaagggctatgagggttctcttataaagctcacatctaaacagcctgtaggttttgtcagttttgacagtcgctcagaagcagaggctgcaaagaatgctttgaatggcatccgcttcgatcctgaaattccgcaaacactacgactagagtttgctaaggcaaacacgaagatggccaagaacaaactcgtagggactccaaaccccagtactcctctgcccaacactgtacctcagttcattgccagagagccatatgagctcacagtgcctgcactttaccccagtagccctgaagtgtgggccccgtaccctctgtacccagcggagttagcgcctgctctacctcctcctgctttcacctatcccgcttcactgcatgcccagatgcgctggctccctccctccgaggctacttctcagggctggaagtcccgtcagttctgctgaatactatacccttcagcaatggctactagaaggacgaacaattgccctcctttggaagtacggctaatagaagccctagatccgaataagatccgaataagaatatgtaatggaccaggcgcagtgcctcacgcctgtcatcccagcactttgggaggctgaggcaggcggatcacttgatgacagaagtgtgagaccagcccagccaacatggtcccaggtgtgtgatggcggctgcaatctgtcttgtgggtattaatgcaatcttcagtggtggctactgttctctagctgttctacaaaactggagcatgctggcttgaaaaacccttgcccagtttggatcccttcaagactttgtcacagcctctatcacacatctgtttttctcgaagaaaaaaatataattaataaaaatgttttactcttttacactg

SEQ ID NO: 26 - DNA, 1828 bp, Homo sapiens
acttctccctagagcaggggtgtttgccagcagcctgcactctcagaaatcagacttgagtggccggaacccttgagaccagaggcttaccatgctgctccctaggagggccaggaactgctgacgtgaccactggacagttattcgtgtctcttacaattaccaaacagaatggacaagcttaataaaataaccgtccccgccagtcagaagttgaggcagcttcaaaagatggtccatgatattaaaaacaatgaaggtggaataatgaataaaatcaaaaagctaaaagtcaaagcacctccaagtgttcctcgaagggactacgcttcagagagccctgctgacgaagaggagcagtggtccgatgactttgacagcgactatgaaaatccagatgagcactcggactcagagatgtacgtgatgcccgccgaggagaacgctgatgacagctacgagccgcctccagtagagcaggaaaccaggccggttcacccagccctgcccttcgccagaggcgagtatatagacaatcgatcaagccagaggcattccccacccttcagcaagacacttcccagtaagcccagctggccttcagagaaagcaaggctcacctccaccctgccggccctgactgctttgcagaaacctcaagtcccacccaaacccaaaggcctccttgaggatgaggctgattatgtggtccccgtggaagataatgatgaaaactatattcatcccacagaaagcagttcacctccacctgaaaaagctcccatggtgaatagatcaaccaagccaaattcctcaacgcccgcctctcctccaggaacagcttcaggtcgaaacagtggggcctgggaaaccaagtcacctccaccagctgcaccatccccgttgccacgggccgggaaaaaaccaacgacaccactgaagacaactccagttgcctctcaacagaatgcttcaagtgtttgtgaagaaaaacctatacctgctgaacgccaccgagggtcaagtcacagacaagaagctgtgcagtcaccagtgtttcctcctgcccagaaacaaatccaccaaaaacccatacctctgccaagatttacagaagggggaaacccaactgtggatgggcccctacccagcttttcatctaattccactatttcagaacaggaagctggcgttctctgcaagccatggtatgctggagcctgtgatcgaaagtctgctgaagaggcattgcacagatcaaacaaggatggatcatttcttattcggaaaagctctggccatgattccaaacaaccatatacactagttgtattctttaataagcgagtatataatattcctgtgcgatttattgaagcaacaaaacaatatgccttgggcagaaagaaaaatggtgaagagtactttggaagtgttgctgaaatcatcaggaatcatcaacatagtcctttggttcttattgacagtcagaataacacaaaagattccaccagactgaagtatgcagttaaagtttcataaagggggaaaaaaaagatcaataccattgcttcagacactttcccaaagtttctccttttgagaaaaagtcccaaaacttcatattttggattatgaatcatccagtaataaaatggaagatggagtcagctattgaagtggtcatccatttctttttaagaagctcatgtggacttgttctattgcctgacctgatgaactgttaatatctggtgaggttgagttatcatgctactaatattttccaaataaatatttttatttttaaaaataaaaaaaaaaaaaa

SEQ ID NO: 27 - DNA, 2422 bp, Homo sapiens
gtcagcctcccttccaccgccatattgggccactaaaaaaagggggctcgtcttttcggggtgtttttctccccctcccctgtccccgcttgctcacggctctgcgactccgacgccggcaaggtttggagagcggctgggttcgcgggacccgcgggcttgcacccgcccagactcggacgggctttgccaccctctccgcttgcctggtcccctctcctctccgccctcccgctcgccagtccatttgatcagcggagactcggcggccgggccggggcttccccgcagcccctgcgcgctcctagagctcgggccgtggctcgtcggggtctgtgtcttttggctccgagggcagtcgctgggcttccgagaggggttcgggccgcgtaggggcgctttgttttgttcggttttgtttttttgagagtgcgagagaggcggtcgtgcagacccgggagaaagatgtcaaacgtgcgagtgtctaacgggagccctagcctggagcggatggacgccaggcaggcggagcaccccaagccctcggcctgcaggaacctcttcggcccggtggaccacgaagagttaacccgggacttggagaagcactgcagagacatggaagaggcgagccagcgcaagtggaatttcgattttcagaatcacaaacccctagagggcaagtacgagtggcaagaggtggagaagggcagcttgcccgagttctactacagacccccgcggccccccaaaggtgcctgcaaggtgccggcgcaggagagccaggatgtcagcgggagccgcccggcggcgcctttaattggggctccggctaactctgaggacacgcatttggtggacccaaagactgatccgtcggacagccagacggggttagcggagcaatgcgcaggaataaggaagcgacctgcaaccgacgattcttctactcaaaacaaaagagccaacagaacagaagaaaatgtttcagacggttccccaaatgccggttctgtggagcagacgcccaagaagcctggcctcagaagacgtcaaacgtaaacagctcgaattaagaatatgtttccttgtttatcagatacatcactgcttgatgaagcaaggaagatatacatgaaaattttaaaaatacatatcgctgacttcatggaatggacatcctgtataagcactgaaaaacaacaacacaataacactaaaattttaggcactcttaaatgatctgcctctaaaagcgttggatgtagcattatgcaattaggtttttccttatttgcttcattgtactacctgtgtatatagtttttaccttttatgtagcacataaactttggggaagggagggcagggtggggctgaggaactgacgtggagcggggtatgaagagcttgctttgatttacagcaagtagataaatatttgacttgcatgaagagaagcaattttggggaagggtttgaattgttttctttaaagatgtaatgtccctttcagagacagctgatacttcatttaaaaaaatcacaaaaatttgaacactggctaaagataattgctatttatttttacaagaagtttattctcatttgggagatctggtgatctcccaagctatctaaagtttgttagatagctgcatgtggcttttttaaaaaagcaacagaaacctatcctcactgccctccccagtctctcttaaagttggaatttaccagttaattactcagcagaatggtgatcactccaggtagtttggggcaaaaatccgaggtgcttgggagttttgaatgttaagaattgaccatctgcttttattaaatttgttgacaaaattttctcattttcttttcacttcgggctgtgtaaacacagtcaaaataattctaaatccctcgatatttttaaagatctgtaagtaacttcacattaaaaaatgaaatattttttaatttaaagcttactctgtccatttatccacaggaaagtgttatttttaaaggaaggttcatgtagagaaaagcacacttgtaggataagtgaaatggatactacatctttaaacagtatttcattgcctgtgtatggaaaaaccatttgaagtgtacctgtgtacataactctgtaaaaacactgaaaaattatactaacttatttatgttaaaagattttttttaatctagacaatatacaagccaaagtggcatgttttgtgcatttgtaaatgctgtgttgggtagaataggttttcccctcttttgttaaataatatggctatgcttaaaaggttgcatactgagccaagtataattttttgtaatgtgtgaaaaagatgccaattattgttacacattaagtaatcaataaagaaaacttccatagctaaaaaaaaaaaaaaaaaaa

SEQ ID NO: 28 - DNA, 1192 bp, Homo sapiens
ccagtgttcccagttcccaccagtccaactgcgaggagtgcgacgtgagtctgagtctgatccctccgaaaaccgtacttccggcgctgtctcggaggcctcccgtcccctcccttgtccgtcttctaactcttccccacgccaggtccgtcaagcctaagtccttgagttccgggtccgggcagcagagaaaggaagtcctctccctggaggcctatctccctcagaacggcgcgagaagcgagaccttagaaggcagcgcttcccgcgaaggaccggaaaggagcgcctactaaggacgccgtcgaggtccggggcgcctcaactctatagctctaactggctagaagtgcccaacgtggaatgtttcttttttaaaggcggctcttgaagcgacccggaagcggaagtggaagaaagttctagtggcttgaggtatccgcagagcggccgggtggcgggaggaaccgttacgggaactgaagttgcggattaagcctgatcaagatgacaacctcccaaaagcaccgagacttcgtggcagagcccatgggggagaagccagtggggagcctggctgggattggtgaagtcctgggcaagaagctggaggaaaggggttttgacaaggcctatgttgtccttggccagtttctggtgctaaagaaagatgaagacctcttccgggaatggctgaaagacacttgtggcgccaatgccaagcagtcccgggactgcttcggatgccttcgagagtggtgcgacgccttcttgtgatgctctctgggaagctctcaatccccagccctcatccagagtttgcagccgagtagggactcctcccctgtcctctacgaaggaaaagattgctattgtcgtactcacctccgacgtactccggggtcttttgggagttttctcccctaaccatttcaacttttttttggattctcgctcttgcatgcctcccccgtcctttttcccttgccagttccctggtgacagttaccagctttcctgaatggattcccggccccatccctcacccccaccctcactttcaatccgtttgataccatttggctccttttttggcagaacagtcactgtccttgtaaagttttttagatcaataaagtcagtggctttcaaaaaaaaaaaaaaaaaaaaaaaaaaaaaaaaaaaaaaaaaa

SEQ ID NO: 29 - DNA, 4163 bp, Homo sapiens
gagggagtgaaatgcttaattcaggaatggattttggagtttctgggtgctgaagaaatagggcctttccgcctgcgggcccagtgagtcgacacggtgggggcccgcgatccccgggacttaccactgaataaatccagtccagcgtgcgacgacttactggcttcatggggtcgcagccgccgctggggtctccgctgtctcgcgaggagggtgaagcgcccccgcctgctcccgcttcggagggtaggcggagaagtcgccgggtacgccttcgcggatcctgccgacaccgacctagctttctgggctgccgggagctcgcggcgagcgccccagccaggcctgcgccggcatcctccgagataatggcatcagctgctaaggaatttaaaatggacaacttttcacctaaagctggcactagcaaattgcaacagacagtaccagctgatgcatctcctgattctaagtgtcctatatgcttggatagatttgataatgtgtcttacttagatcgctgcttacataagttctgttttcgctgtgtacaggagtggtcaaaaaacaaagctgaatgcccactatgtaaacagccctttgattctattttccattctgtgagggcagaagatgacttcaaggagtatgtcctaaggccttcgtataatggttcttttgtcacccctgatcgacgatttcgctaccgtacaactctgacaagggaacgaaatgcttctgtgtattcacctagtggtcctgtgaacagaagaacaacaactccaccggatagtggagtactgtttgaagggttaggcatttcaacaagacctagagatgttgaaattcctcagtttatgagacagattgcagtaaggaggccaactacggcagatgaaagatctttgcggaaaattcaagaacaagatattattaattttagacgaactctttatcgtgctggtgctcgagttagaaatattgaagatggtggccgctacagggatatttcagctgaatttttccgtagaaatccagcttgccttcacagattagtcccctggttaaaacgtgaacttacagttctttttggagctcatggatctttagtgaatattgtccagcatattatcatgagtaatgttactcgctatgacttggagagtcaggcatttgtgtctgatttaagaccatttttacttaatcgaactgagcattttatacatgaatttatcagttttgcccgatctccttttaacatggcagcctttgaccagcatgccaattatgattgccctgctccttcatacgaagaaggcagccattctgattcttcagtcataacaatatctccagatgaggctgagacccaagagctggatattaatgtagccactgttagtcaggcaccatgggatgatgaaactccaggaccatcttactcaagctcagagcaggtacacgttactatgtcttctcttttaaatacttctgacagttcagatgaagaacttgtcacaggaggagccacgtctcagatacaaggagtacaaaccaatgacgacctaaataatgacagtgatgattcttcagataattgtgtcattgttgggtttgttaaaccactagctgagaggaccccagaacttgttgaactgtcctctgattctgaggacttaggttcttatgagaaaatggagacagtgaagacacaagaacaggagcaatcttacagttctggtgatagcgatgttagtagatgctcatctccacactctgtccttggaaaggatgaacaaataaataaaggtcattgtgattctagtacaagaatcaaatcaaagaaggaagagaaacgatctacatcattgtcatctcccagaaacctgaactcatctgtaagaggagacagagtatattctccatataaccatagacacagaaagaggggaagatcaagaagttcagattcacgttctcagagtagaagtgggcatgatcagaagaatcatagaaagcatcatgggaagaaaagaatgaaaagtaaacgatccagaagcagggaaagtagcagacctagagggagaagagacaaaaagagatcaagaactagagatagcagttggtccagaagaagccaaactctgtctctaagtagtgaaagcacaagcagatcaaggtctcgtagcagtgatcatggtaaaagaagatcacggagcagaaatagagatcgttattatttaagaaataattatggaagcagatacaaatgggagtatacttattacagtagaaacaaggacagggatgggtacgaatcatcttacaggaggaggactctgtccagagctcattattctagacagtcttcaagtccagaatttagagttcagtccttttctgaaagaacaaatgctaggaaaaaaaataatcacagtgagaggaagtattactactatgaaaggcacagatcaaggagcctgtctagtaacagatcaaggactgcatctaccgggactgaccgggtgagaaatgaaaagcctggagggaaacgaaaatacaaaacacggcatttggagggtactaacgaagtggctcagccatctcgtgaatttgcttctaaagcaaaggacagtcattaccaaaaatcttcatcaaaattggatggaaactacaaaaatgagagtgataccttttcagacagccgatcatcagacagagagacaaaacacaaaaggagaaaaaggaagacccggagcctaagtgtagagatagtttatgaaggaaaagctactgatacaactaaacaccataaaaagaaaaagaagaaacataagaagaagcataagaaacaccatggagataatgcttcacgttccccagttgtaattaccattgacagtgacagtgataaggattctgaagtaaaggaggatacagaatgtgacaatagtggtcctcaagaccctctacaaaatgagtttttggctccttccttggaaccatttgaaactaaagatgtagttacaatagaagctgaatttggtgtgctggacaaggaatgtgatattgccacacttagtaacaacttgaataatgccaacaaaactgtagataatattccacctctggcagcttcagttgaacaaactctcgatgtaagagaagagagcacctttgtttctgatttggagaaccagcccagtaacattgtgtctcttcaaactgagccatcaaggcaattgccatcgccacggacatcattaatgtcagtatgtcttggtagagactgtgatatgtcttaaaactgccaaagcatttcattgagaattatgatgttataaaaaggaaaaaggaagaatgtcgtctactgcagtctatttaaagatgacatttggtgaaaactctcttcctccttacaatattttaaatgattttttttttggtgttaatttgtaaaaatcattatttgttcaaaatgtatgtcccaccctcaaagatatgcacttttaagtgaagaaaatgatactgctagcagcttatttaaaacttggggtcctttttaaataagaaaaattatataaattttagaagttatttcataaagccatacggtattgacatatttttaaggtagtcaatgagtatttttgaattttttttttttgagagttattctggaaatgtgttataagctaggagaatccctttggacagtctttatttttcttcttaaaaatttatatgattcaaaaccatttcttcaggttaaattgaggcattttaatctgcacagtttatcttctgccaaaataaaaatttactatttcctttatatacttgtttatctggactgccagtaaaacaaatgtgtattcaacaaaagaaaaaaaataaaacagtaacactttaaaacaagaatcagacattttcctatgcagtatttttttttaaagtttattttagtaaagttaaaatcttgaaagtagctaagggcataattatgtcataaatactgaacttcaggtgaacaaatactttatagttttaattattttctttgattttgaggagtatcttatttgctttctatcatcagtaaaaacagcatttaacttgctaaataaacatgaaaaacccttgtcataaaaaaaaaaaaaaaa

SEQ ID NO: 30 - DNA, 5702 bp, Homo sapiens
gccctggtgccaggcgctcagctcggcgctcccctgtgctcgcccggcgcccactcattcgcagcccggccttcgtcgccgccgcctccctgctgctcctcctcctttccccagcccgccgcggccatggcggacagcgccagcgagagcgacacggacggggcggggggcaacagcagcagctcggccgccatgcagtcgtcctgctcgtcgacctcgggcggcggcggtggcggcgggggaggcggcggcggtgggaagtcggggggcattgtcatctcgccgttccgcctggaggagctcaccaaccgcctggcctcgctgcagcaagagaacaaggtgctgaagatagagctggagacctacaaactgaagtgcaaggcactgcaggaggagaaccgcgacctgcgcaaagccagcgtgaccatccaagccagggctgagcaggaagaagaattcattagtaacactttattcaagaaaattcaggctttgcagaaggagaaagaaacccttgctgtaaattatgagaaagaagaagaattcctcactaatgagctctccagaaaattgatgcagttgcagcatgagaaagccgaactagaacagcatcttgaacaagagcaggaatttcaggtcaacaaactgatgaagaaaattaaaaaactggagaatgacaccatttctaagcaacttacattagaacagttgagacgggagaagattgaccttgaaaatacattggaacaagaacaagaagcactagttaatcgcctctggaaaaggatggataagcttgaagctgaaaagcgaatcctgcaggaaaaattagaccagcccgtctctgctccaccatcgcctagagatatctccatggagattgattctccagaaaatatgatgcgtcacatcaggtttttaaagaatgaagtggaacggctgaagaagcaactgagagctgctcagttacagcattcagagaaaatggcacagtatctggaggaggaacgtcacatgagagaagagaacttgaggctccagaggaagctgcagagggagatggagagaagagaagccctctgtcgacagctctccgagagtgagtccagcttagaaatggacgacgaaaggtattttaatgagatgtctgcacaaggattaagacctcgcactgtgtccagcccgatcccttacacaccttctccgagttcaagcaggcctatatcacctggtctatcatatgcaagtcacacggttggtttcacgccaccaacttcactgactagagctggaatgtcttattacaattccccgggtcttcacgtgcagcacatgggaacatcccatggtatcacaaggccttcaccacggagaagcaacagtcctgacaaattcaaacggcccacgccgcctccatctcccaacacacagaccccagtccagccacctccgcctccacctccgccacccatgcagcccacggtcccctcagcagccacctcgcagcctactccttcgcaacattcggcgcacccctcctcccagccttaatgcatgagcttagtctgaatttcaagttgggactcatccaatggagccgtctactcaacgccaaaggcttccttctctggcatatttggatatgacttatttgcactgaggttatctaggcttcactatccattgtgttgtaaatgtttgtcagaaatgcagccagtgttgtgggtctacaacactaaccagacgactttttccatcagtgttttacttgaatcttcatgtacgtccattccctggctggaaccttcgctgtttggtatttggtatttcagcagcagtgtgcaatttttgcttggcccagagcttcattctcctggcttttaggtttgtaaaagaaaaagggatatcttttttatatttttttccatgaatctgcagaaaattactgagctgttgttaccctcctctcattataatagtgtttaccaaacataccaataattcagcactacaattcagacctttgaaaatctggctttcagtgtagaacagaaagttagatgaatcagtgcccaagacatattttctgtttaacagaactttctacagatacattttttacaggttattttcattgtgttattgacatccatgtctctcgtaaaacagatggcccaaagtaatgaatcatgtggctgtaccttctccacataaatgggatggataattatcgtatattaagatgtgattctcttttttatccttaatgttaatctacttaacctggccccctctaacatgagtcgataaatgttgtcctactcaccggtggtttcaatggctaattagaatgtgttatttgatttctgctgcagaaggcagtgtgattgtaacaaaaacaatgcggcttccccctttcgtacttcatttgtgttctcttaaaatagagtttgaacaaatattttaaaggtgcaaaataccattagaaaatactatttgaaatggacattatcgcattatcttggcataatggccagaaaatattgtattgcttggcagaaaagaaaataaggtctaaaggaaagtagcacattagcattgatggctgttcatttcacccagtataagcaagtgcagtgtacaaagaagtatattctgaatacattatttccattcatttagcacaaataaatcatttggtttcactttgcagtggaacactgagtcactcttttcttaacacgtgcaacatcttaatttttgtttttcagcagttgctgttttgtactttggtagtgaagtgatttttaccacctgtgtttgcatatttatatatgctgtggatgaaaataacttactagagaatgtatattttatgacaagaatgtgtatctgttggatataatcagagaactgaaaagtaatttatcagtaatttttaagagtccatgttttgtgacaaccatctctaatagccaactctttattaaacacactcctaaaaataaggaaccatgacattgtagatatttaatattgtacagtatagaaacctccatttttgccttcgaatgcatatttaagagttaacagaatgaaaaaaaaaagtcttgttggataatagtgtttgactagcgttttaagaacttgagagtaaaagcaacaataagattttttcacctcttcctgcttccacccccaaactgagaacatcactcaattgtttggaagaaactgtaggtctatataaattttatttataatgtatgtgtaatatacataatcataatacagttctcagatgcagggaagaagtttggcatttaatcattgaggctttaggtttttgatgtgatcagactgggccatgtcaaacccggaattttcaccaacagttcactcaccctcctggtacattgccattccaaggaattctgagagtaggcaaacaaattttgccttcatggtacagttctcagtttttcttataggagaaatatggtatatgtttataagaatcttttatgagattatagatttcaatgctgtggatagtgtcttgcacccaaacaagaaagtccataatggaatgatcttccctcagcttcctatcgatttagttacctcttgaaagcacaaaaattaaaacattgccatatgttgaatttttaaaaagcacttggagtgagcgaacatttcctgataaatgccttttagagataggttcttgatattcagacatctgcagaaatgttctggttcccaaagtcatttcacttcgaaataaaacacagctccttcaaacagcactttttccacataaatctagttgcctctccctgtggacattcagaactgatagaacaaacactactcttttgaatttgatggttcgtgtcctttaaagtgtttgaggacctatgcagagcctgtaacacttgggtagtacctgctaggacaatttcttggcaattgtcttactactagggatcagtaagatttagattctgagcccataatggcaacagccccctcacctatgggaagctgacttccctcagtcgggcacttctcatgggggctgaacatggttcctgccattctgttacccactctcccaggtgagccctggattggctcccagaaggcctttgtaaaatcagtagccatcctgcaggcaggtgggagcaacaggggcttcagtagcttcattttcctgtcttgcagacagagacccttggctaccactgtgctgctaataggataagtactctgttgccagattaccatgccttttatacaaaaccaaattaacttacctaatacctgacacctctttgggctctgaactgctttctctcatcaagcatgctagcactctagacagaattctagaaatttggcagacagtggaagcctttaattgaacttactccttcgttgactgaaaggagttttaaattctgagctcctgagatactgactagcaaccatggaatgaatgtgtgaccagaaagtggctttgacaccaagtgctactgtccctttgtaattggcttctaacagattcaaccagaaataattgataatgtgaatttttgttaattgttcacttgtaggaaaatagaacatgtatcaccctttgttaggtagacatgaacttttcctgcacaaagccttgcttttagagaatgcccaataaggcaagaaaaagcatagtaacttgtgctttgagagctcaatatttgtatcttatcagtacagaagaaatatttctgtgtaacttgatcttctgtctagtacttgtcttataggtaaccaacactgaaaactttgtagtgatgactaccaaagaaatacatagtaaaacaaccttttatttccaaattgttaaagagccagccattgatgctgctacatgagttccatgctcaagagccattgtaagagattaaggggtttctaggtttttggtgattttttgtttgtttttttctttgttttttagggtttttttttcttctttaattttttgattaaaacatacacacagctgttagcataaagtcgtggggggcattttctggaatgctcagcagttctgattaactgccaagcccaggttgcctctcatgaggcaactgaaaaaatcctgtgtcttgatagcatgggtgctgtgtgtgtgcatgtgtgtgtctgcattcatgccttaactcgggttactgcacaactttagttcttgacttagtctgcaccgtcatctagattgtattgtacatctcggtctgaacttcatcctggcaaaaacaaagttgcaggcacaacagtttaagaatgcattcctccagaagagtatctggtcaggttgaccctgagccttctttggacttgatttggaacttagcctggaaagcgaaagtggactgtccaacagaaagatgtcaacaaggaaaagaggagagccaagcgctagcatgccttttgcctctgcatatctgtgcacactgtatgttgttcatgatagcttgtctacaacttgactaggttggagttctggtaatagtggcaatcttgacattcttggtcagagtttagagagatgtaagactttcaattaatgtcttatttactcctttatgttgattagtctttgatacatgtgctgaatcagaaacctaaataaagataattttttaaaatgt

SEQ ID NO: 31 - DNA, 1895 bp, Homo sapiens
cggaaaaaaaaatggttgaagcagatcgcccaggaaagctcttcattggtgggcttaatacggaaacaaatgagaaagctcttgaagcagtatttggcaaatatggacgaatagtggaagtactcttgatgaaagaccgtgaaaccaacaaatcaagaggatttgcttttgtcacctttgaaagcccagcagacgctaaggatgcagccagagacatgaatggaaagtcattagatggaaaagccatcaaggtggaacaagccaccaaaccatcatttgaaagtggtagacgtggaccgcctccacctccaagaagtagaggccctccaagaggtcttagaggtggaagaggaggaagtggaggaaccaggggacctccctcacggggaggacacatggatgacggtggatattccatgaattttaacatgagttcttccaggggaccactcccagtaaaaagaggaccaccaccaagaagtgggggtcctcctcctaagagatctgcaccttcaggaccagttcgcagtagcagtggaatgggaggaagagctcctgtatcacgtggaagagatagttatggaggtccacctcgaagggaaccgctgccctctcgtagagatgtttatttgtctccaagagatgatgggtattctactaaagacagctattcaagcagagattacccaagttctcgtgatactagagattatgcaccaccaccacgagattatacttaccgtgattatggtcattccagttcacgtgatgactatccatcaagagaatatagcgatagagatggatatggtcgtgatcgtgactattcagatcatccaagtggaggttcctacagagattcatatgagagttatggtaactcacgtagtgctccacctacacgagggcccccgccatcttatggtggaagcagtcgctatgatgattacagcagctcacgtgacggatatggtggaagtcgagacagttactcaagcagccgaagtgatctctactcaagtggtcgtgatcgggttggcagacaagaaagagggcttcccccttctatggaaagggggtaccctcctccacgtgattcctacagcagttcaagccgcggagcaccaagaggtggtggccgtggaggaagccgatctgatagagggggaggcagaagcagatactagaaacaaacaaaactttggaccaaaatcccagttcaaagaaacaaaaagtggaaactattctatcataactacccaaggactactaaaaggaaaaattgtgttactttttttaaattccctgttaagttcccctccataatttttatgttcttgtgaggaaaaaagtaaaacatgtttaattttatttgacttctgcattgcttttcaacaagcaaatgttaaatgtgttaagacttgtactagtgttgtaactttccaagtaaaagtatcccctaaaggccacttcctatctgatttttcccagcaaatgaggcaggcaattctagtcttccacaaaacatctagccatctaaaatggagagatgaatcattctacctatacaaacaagctagctattagagggtggttggggtatgctactcataagatttcagggtgtcttccaactgaaatctcaatgttctcagtacgaaaaacctgaaatcacatgcctatgtaaggaaagtgctattcacccagtaaacccaaaaaagcaaatggataatgctggccattttgcctttctgacatttccttgggaatctgcaagaacctcccctttcccttcccccaataagaccatttaagtgtgtgttaaacaactacagaatactaagtaaaaagtttggccaaaaccaaaaaaaaaaaaaaaaaaaaaaaaaaaaaaa

SEQ ID NO: 32 - DNA, 4373 bp, Homo sapiens
cggctcggtgttggggctaggccggtattctaggcccaagcccaggcccaggcctgtgttcccggcccttgctcaaagacaggccggtggccgctgcgacactctaggtacagcggagggcgcagcgggccgttcgctgaggtgtccggacccgccgccgagcgggccgtggagccacagtacgtggcggcgcctcttccttgcccgaagcggaactgctgaaggagcggcagcgcaggccggacgaggtgaaccaggtcatttaaccgccttcaggtgatgaatcatctgtctaataatcagatttgaggtccacagccctttgtggtcctgctacagggtgattttcagtggatgactgactggcgtggcccgaggggtgccgcagtgactgccttcccttgataaggaaacgagctttctgttctttctggacacctcgttacctgtaaaacattccggttataacttctttatccggcttgcatctctgtgcaagaggaaagctttcacatgaaagtgtcccttggtaacggcgaaatgggcgtctctgcccatttgcagccttgtaaggcaggaaccacacgcttttttaccagcaatactcacagttcggtggtattgcaaggctttgatcagcttagaatagaaggattgctttgtgatgtgaccctggtaccaggtgatggagatgaaatcttccctgttcacagagctatgatggcgtctgctagtgattatttcaaagccatgttcacaggtggaatgaaagaacaagatttgatgtgcattaagcttcatggggtgaacaaggttggtctgaagaaaatcattgattttatttatactgcaaaactttctcttaatatggacaatcttcaggacacacttgaagctgctagctttttacaaatattacccgttttggatttctgtaaagtatttcttatatcaggagtctctttggataactgtgttgaggttggacgaattgctaacacctacaatcttatagaagtggataaatatgttaataatttcatcctgaagaactttcctgctttattgagtactggggagtttctaaaactcccttttgaacgacttgcatttgtgctttccagtaatagtcttaagcactgtaccgaacttgaactctttaaggcagcctgtcgctggctaaggttggaagaccctcggatggattatgctgcaaagttaatgaagaatattcgatttccactgatgacaccacaggatctcatcaattacgtgcagacagtagatttcatgagaacagacaatacctgcgtgaatttgcttttggaagctagcaattaccaaatgatgccatatatgcagccagtgatgcagtcagatagaactgccattcgatctgactccactcacttggttacattaggaggagttttgaggcagcagctggttgtcagtaaagaattacggatgtatgatgaaagggcacaagaatggagatctttagccccaatggatgctccccgttaccagcatggtattgctgtcattggaaactttctttatgtagttggtggtcagagtaattatgatacaaaaggaaaaactgctgttgatacagttttcagatttgatcctcggtataataaatggatgcaggttgcatcattaaatgaaaagcgcacattctttcacttgagtgccctcaaaggacatttgtatgcagttggtgggcgcagtgcagctggtgaactggccacagtagaatgttacaacccaagaatgaatgagtggagctatgttgcaaaaatgagtgaaccccactatggtcatgctggaacagtatatggaggcttaatgtatatttcaggaggaattacccatgacactttccaaaatgagctcatgtgttttgacccagatacagataaatggatgcaaaaggctccaatgactacagtcagaggtctgcattgcatgtgtacagttggagataagctctatgtcattggtggcaatcacttcagaggaacaagtgattatgatgatgttctaagctgtgaatactattcaccaacccttgaccagtggaccccaattgccgccatgttaagaggccaaagtgatgttggagttgccgtctttgaaaataaaatctatgttgttggtggatattcttggaataatcgttgtatggtagaaattgtccagaaatatgacccagaaaaagatgagtggcataaagtttttgatcttccagagtcacttggtggcattcgagcctgtacactcacagtttttccacctgaagaaaaccctgggtcaccttctagagaatcacctctttcagcaccttcagatcattcttaggtctaaggtgtaacacctttgcagtacgtcatgggtgatctaatacttccccttcagttgtatcttcttacagtgattggtacagttattagatataaaggtaactgatgttattcgtcttgtatggcttttagtatgtttatcaagtggctaacaaatgcattctgaaaatgtatttaacatagctgttttaacaaatgaaaaaaagacgtagaaaaatgtttagatgtctttttgtgatgttatataaaattgtagatgactgtggtaaatgtgtaattatgtccattatgcttcaaagttgagttttcatctttgactccaaaatgtcagagggaggccgctctaaactaaaaataacgaaaggttgccaagtattaatactagttacctccctcttttcgtagtttttgtcatgtctgtcaacttactcgattgtgtggttgcattcagaatatttgaagtttcttacgtagacagaaataataaaaatattaactaggaaaaaacagtatagcaccaagccagtatttggtatctctctctagagcgagcaagagagggagagaggaggaaaaaatacacataatacaaacatacatgcatgcacacatacatacatatgtatacacacacataatttgaaaactgattggcacttcaacgatgctgaaattgtttttaaattgaagtttctttcttccacaaagcagccgtttctattcaaatggaaattcagtaccagagaataaatgtctatgtagtcatactgaatttagatagataagggctacagcatactaaatcgacaaccaaatttgtcatgtgactaaaccgttacttcagatgaagcttacattactgttttctgcttgtgtattttctgtagagtacttttacacagattggtaaagttcaggtttcagagaactgcttttgtgcagaaaatttaggttcttttttccacctttttggtcagtaaaacttaatgaaaaaagcaaagaaaaaaatattctgaacaaagctatagggttttaagttcagcctcccaacttagtcatcctaacatgattattttgtgatttggggtgcttgccctggtgctgttccagtccatgtgcatcctgagctgtgtgatctgcctcgaggctatgatctgagcaagcaggagataacattttcttctgcatcaagtgaggaaaaatgtgcttttggccatgtctcaaagacaggaccaacttcagattcccaaagaagccagctacagagcctctggaacactatggtcttacaagcagtactaaaatcaaccctcagcctcttcaatgccaaaggtatccctattggttgagaaccacatggtaatttttaatgggacttttatcagcaaatggagttacaggaattctctgtaatgagtgattctgaagaggtactttcctggaataattgtctacctgaagaaaaaaaatttatatatacattgtgtgtgtgtgtaatacacacacacacaaccccctatacctggaagattgtcagcatgtaaatcaggaacaactttctccttattgacaatcccataataaaactcaggaaccaaggcaaaatgaattggcttctaggggtctgaaccttactgcccatacaagtgttgattcattttaatgctgtttatgatttctgcattggcagaaattttcatactttctatgtttttttaattactcagttttttattactaaaaatagcacatttgagtacatttgaaaagtagaaaaattagaaattattaactttattgaataagcaagaagtgcatcctaatcctttgattattaatgaggttgaatatttgtgtgctatcggtagctgtgtttctttgatcaaatgttcctgtccttttgcccttctgttatctgttggagttgctttgtttttcgtatcaagttataggatctctttatataataaatgtaatttaacttgaaaaaaaaaaaaaaaaaaa

SEQ ID NO: 33 - DNA, 4071 bp, Homo sapiens
ccacgcgtccgcgggttcccagaaagtagcttgatgagtgtccaaagtagcagtggaagtttggaggggccgccatcttggtcccagctctccacgtctccaaccccgggctcggcggcggcggccaggtccctgctgaatcacacgccgccatccgggaggcccagggaaggtgcaatggatgagcttcatagtctggatccaagaaggcaagagttattggaagctagatttactggagttgcaagtgggagcactggaagtacgggcagttgcagtgttggagctaaagcctcaacaaataacgaaagctctaatcacagttttggaagcttgggatctttaagtgacaaagaatcagagacaccggagaagaaacaatcggaatcatccaggggaagaaagagaaaagcagaaaaccagaatgaaagtagtcagggaaaaagtattgggggacgtggccacaaaattagcgactattttgaataccagggtggaaatggctcaagtccagtaagaggcatacctcctgcaatccgttctcctcaaaattcacattcacattccactccttcctcatctgttcgaccgaatagcccttctcctactgcattagcatttggggaccaccctattgtacaaccaaagcaattatcctttaaaattattcagactgatctcacaatgctgaaattagcagcattagaaagtaataaaatccaggacctggaaaagaaggagggacgtatagatgatttgctcagggctaactgtgatctcagacggcaaatagatgaacaacaaaaattacttgaaaaatacaaagaacgattaaataagtgcatatcaatgagcaagaaacttcttattgaaaagagtacacaagaaaagctgtcaagcagagagaagagtatgcaagatcgattacgccttgggcactttacaacagttagacatggcgcttcatttactgaacaatggacagatggttttgcatttcagaatcttgtgaagcaacaagaatgggtgaatcagcaaagggaagatattgaaaggcaaaggaaacttctagccaaacgcaaacctcccacagctaataattctcaggcaccctctaccaattctgaaccaaaacaaaggaaaaacaaagcagtcaatggagcagagaatgatccctttgttagaccaaatttaccacaactgttgactttggcagaatatcatgaacaggaagaaattttcaaacttagactaggacatctcaaaaaggaagaggcagaaatccaggcagaacttgaacgtttggaaagagtcagaaatcttcacatacgtgagctgaaaagaataaacaatgaagataattcacagttcaaagatcacccaacattaaatgaaagatatttattacttcatctgcttggtagaggtggctttagtgaagtgtataaggcttttgacctttatgaacaaagatatgctgctgtgaagatacatcagcttaataaaagctggagagatgagaagaaagaaaactaccacaaacatgcctgcagagagtatagaatacacaaagaactggatcaccccagaatagttaaactctatgattatttctccttggatacagatacgttttgtacagtgttagaatactgtgaaggcaatgacttggatttctatctgaagcaacacaagttaatgtcagagaaagaagctcggtctattgtaatgcagattgtaaatgcactaagatatctcaatgagatcaaaccccctattatacattatgatcttaagccaggaaacatcctactggtagatggaacagcatgtggtgaaatcaaaatcactgattttggtctgtccaagattatggatgatgatagctatggtgtagatggaatggatctaacttcccagggggcaggcacttactggtatttacctcctgagtgttttgtagttggaaaagagccaccaaagatttccaacaaggttgatgtatggtcggttggagtcatcttctttcagtgtctttatggtagaaagccatttggtcacaatcaatctcaacaagacattcttcaagaaaatacaatattaaaagccacagaagtccagttccctgtaaaaccggttgtaagcagtgaagccaaggcatttataagacgctgtttggcatatcgaaaagaagatcgatttgatgtgcaccagctggcaaatgacccataccttctcccacacatgagaagatcaaattcttcaggaaacctacacatggctgggctgacagcatcccctacacccccttcttcaagcataattacttactgactttcctccaagattggcatgatatctttgaatttgcttccagatgcacacttaagtttgagagcatttgagtgtttgttttctttttctttttttttttttttttttttacacaagacgtggttaagaactgtttgtgaactgaagttcctcatagtgtcatttgtatgagagaggatcatggacaatgaataaatgcacacttctgactataattttgagcagtgaaggaaggatgactgcctgttacacagaaacaggaataccatgttaagatagaggaaaaaaattttgtttatttgggggaacactgtaaataacgtttataatacttaaatacatttggttgttactagagagttctaatatgaagggtagtttttcattatttaaaaacacatggaaaaatatgagacatatttctaacatacgaactatagtgcctggatacattcttcagcatttggcagttaatctgctgaaaccaaagtaagaactgaatgacagtgacagttgtgttttatagtaatagaatgtgagagttagaatctttggacaaagttaggctttgtcatttgcctattcagacttttaccaagttgtacctcgagatcacatgtccgttttctttcactggttatattaaagggagagctattatttctaaatactttacacctttgacaaaatgagctgcttgtgttgaaatcagttgaattcactaaattataatattgccagtgttttcaacacgttagaattgataacaggtatttttcttttgttaccaggccttgttcatcaaaacaggtgacagtgagtaaccaaatgcagaccagttctatgcaggataatgataaattcccttctagctctattgtaaattgttgtacagatgtcatatttcaattactaagtttcagcagcttattcttgtacaaatgtttaaaatatggcttttctaattggatattgtattttttttaagtcttcttgaaggcactctaattgctgctaaatgatgttgcttctttgctaaaaaattaaatgacctagaaggtgcaagttgactgtacatcatagatattaaaaagcagacagtcattaacaatcaagatgtaaaagtgatccatgttggacataattgagtttttaaatcagtttattgggttctagggctgtagaacacatagatactagatttttaatttgttcatggttattctacatttctagaaagttcttatcagcaagatggtcccataagcaaatttcttgtggtttgtacagatttgttaaaatgtgaacgttttctaactgcctcgtagggtagaaaccaatatttttcaggatgctgtatttcactcctgtaaggactttttctttattgtcacattcataatgctgatacttacatgtaagttgttcatgttgcagaaaaaggttatacgtaccacggattctctttaatattgtacagttaaactgtatttctgatgttgcaagccattttgttttttcattgtacatagacacattgtctctttaaaatgctgctgaaattgtagagagtatagccaaaacagtaataaacaatgacagttaaaatgtaaagactatgaaaattacattggaagggagctttcaagatggtaggatattgactaactgagctccttcacttaaaaatcagctgaataaattccttaagtatacttcaaaaaaaaaaaaaaaaaa

SEQ ID NO: 34 - DNA, 2061 bp, Homo sapiens
tgttccgcgatcttctcaggctctcctagcagcatccatcgccgccaccctatcttcactggcttcaccttctccttctctcttcgttgctgagcgacaagcttcctagcgctatgactgtcgtctccgtcccgcagcgggagccgctcgtcctgggtggccgccttgcgccgcttggcttttcctcccgaggttactttggggccctcccgatggtgaccacggctccgcctcctttaccccggatcccggacccccgggcactgcccccgaccctcttcctccctcatttcctagggggagatggcccgtgtctgaccccccagcctcgcgctccagcagctctgcccaaccgcagcctcgccgtggcgggaggcactcctcgggcagcgccgaagaagcggcgaaagaagaaggtgcgggccagccccgcagggcagctgcccagccgcttccaccagtaccagcagcaccggccgagtctggagggcggccggagccccgcgaccggcccgagcggagcgcaggaggtcccgggcccggccgccgccttggccccgagtcctgcagccgcagccggcacggagggagccagccccgaccttgccccgctgcggcccgcggctcccggccaaacccccctcaggaaagaggttttaaaatcaaagatgggaaaatcggagaaaattgcccttccccatggccagcttgttcatggtatacacttgtatgagcaaccaaagataaacagacagaaaagcaaatataacttgccactaaccaagatcacctctgcaaaaagaaatgaaaacaacttttggcaggattctgtttcatctgacagaattcagaagcaggaaaaaaagccttttaaaaataccgagaacattaaaaattcgcatttgaagaaatcagcatttctaactgaagtgagccaaaaggaaaattatgctggggcaaagtttagtgatccaccttctcctagtgttcttccaaagcctcctagtcactggatgggaagcactgttgaaaattccaaccaaaacagggagctgatggcagtacacttaaaaaccctcctcaaagttcaaacttagatttcagatttcagtatgtgtgtaaaacataatttttcccatatccctggactcttgagaaaattggtacagaaatggaaatttgccttgttgcaacatacaattgcaaaagatgagtttaaaaaattacatacaaacagcttgtattatattttatattttgtaaatactgtataccatgtattatgtgtatattgttcatacttgagaggtatattatagttttgttatgaaagtatgtattttgccctgcccacattgcaggtgttttgtatatatacaatggataaattttaagtgtgtgctaaggcacatggaagaccgattttatttgcacaaggtactgagatttttttcaagaaacagctgtcaaatctcaaggtgaagatctaaatgtgaacagtttactaatgcactactgaagtttaaatctgtggcacaatcaatgtaagcatggggtttgtttctctaaattgatttgtaatctgaaattactgaacaactcctattcccatttttgctaaactcaatttctggttttggtatatatccattccagcttaatgcctctaattttaatgccaacaaaattggttgtaatcaaattttaaaataataataatttggcccccccttttaaaatagtcttgactctttgtgtgtgactgtttctcatgtttgaatgtgtgactaggagatgattttgtgtggttggatttttttgacttctactttactggctgagtgtgagccgccatgcctggccataatctacattttcttaccaggagcagcattgaggtttttgagcatagtacttgactactctagaggctgagacgggagcatctcttgagcctgagaagtggagattgcaattgagctaggatcaggccactgcactccagcctgggtaacagacgctgtctcaaaaaaaaggccaagagaaagtaagggagacaga

SEQ ID NO: 35 - DNA, 2751 bp, Homo sapiens
atggagtcagggcagccggctcgacggattgccatggcgccgctgctggagtacgagcgacagctggtgctggaactgctcgacactgacgggctagtagtgtgcgcccgcgggctcggcgcggaccggctcctctaccactttctccagctgcactgccacccagcctgcctggtgctggtgctcaacacgcagccggccgaggaggagtattttatcaatcagctgaagatagaaggagttgaacacctccctcgccgtgtaacaaatgaaatcacaagcaacagtcgctatgaagtttacacacaaggtggtgttatatttgcgacaagtaggatacttgtggttgacttcttgactgatagaataccttcagatttaattactggcatcttggtgtatagagcccacagaataatcgagtcttgtcaagaagcattcatcttgcgcctctttcgccagaaaaacaaacgtggttttattaaagctttcacagacaatgctgttgcctttgatactggtttttgtcatgtggaaagagtgatgagaaatctttttgtgaggaaactgtatctgtggccaaggttccatgtagcagtaaactcatttttagaacagcacaaacctgaagttgtagaaatccatgtttctatgacacctaccatgcttgctatacagactgctatactggacattttaaatgcatgtctaaaggaactaaaatgccataacccatcgcttgaagtggaagatttatctttagaaaatgctattggaaaaccttttgacaagacaatccgccattatctggatcctttgtggcaccagcttggagccaagactaaatccttagttcaggatttgaagatattacgaactttgctgcagtatctctctcagtatgattgtgtcacatttcttaatcttctggaatctctgagagcaacggaaaaagcttttggtcagaattcaggttggctgtttcttgactccagcacctcgatgtttataaatgctcgagcaagggtttatcatcttccagatgccaaaatgagtaaaaaagaaaaaatatctgaaaaaatggaaattaaagaaggggaagaaacaaaaaaggaactggtcctagaaagcaacccaaagtgggaggcactgactgaagtattaaaagaaattgaggcagaaaataaggagagtgaagctcttggtggtccaggtcaagtactgatttgtgcaagtgatgaccgaacatgttcccagctgagagactatatcactcttggagcggaggccttcttattgaggctctacaggaaaacctttgagaaggatagcaaagctgaagaagtctggatgaaatttaggaaggaagacagttcaaagagaattaggaaatctcacaaaagacctaaagacccccaaaacaaagaacgggcttctaccaaagaaagaaccctcaaaaagaaaaaacggaagttgaccttaactcaaatggtaggaaaacctgaagaactggaagaggaaggagatgtcgaggaaggatatcgtcgagaaataagcagtagcccagaaagctgcccggaagaaattaagcatgaagaatttgatgtaaatttgtcatcggatgctgctttcggaatcctgaaagaacccctcactatcatccatccgcttctgggttgcagcgacccctatgctctgacaagggtactacatgaagtggagccaagatacgtggttctttatgacgcagagctaacctttgttcggcagcttgaaatttacagggcgagtaggcctgggaaacctctgagggtttactttcttatatacggaggttcaactgaggaacaacgctatctcactgctttgcggaaagaaaaggaagcttttgaaaaactcataagggaaaaagcaagcatggttgtccctgaagaaagagaaggcagagatgaaacaaacttagacctagtaagaggcacagcatctgcagatgtttccactgacactcggaaagccggtggccaggaacagaatggtacacagcaaagcatagttgtggatatgcgtgaatttcgaagtgagcttccatctctgatccatcgtcggggcattgacattgaacccgtgactttagaggttggagattacatcctcactccagaaatgtgcgtggagcgcaagagtatcagtgatttaatcggctctttaaataacggccgcctctacagccagtgcatctccatgtcccgctactacaagcgtcccgtgcttctgattgagtttgaccctagcaagcctttctctctcacttcccgaggtgccttgtttcaggagatctccagcaatgacattagttccaaactcactcttcttacacttcacttccccagactacggattctctggtgcccctctcctcatgcaacggcggagttgtttgaggagctgaaacaaagcaagccacagcctgatgcggcgacagcactggccattacagcagattctgaaacccttcccgagtcagagaagtataatcctggtccccaagacttcttgttaaaaatgccaggggtgaatgccaaaaactgccgctccttgatgcaccacgttaagaacatcgcagaattagcagccctgtcacaagacgagctcacgagtattctggggaatgctgcaaatgccaaacagctttatgatttcattcacacctcttttgcagaagtcgtatcaaaaggaaaagggaaaaagtga

SEQ ID NO: 36 - DNA, 1340 bp, Homo sapiens
ggcacaagggggcgctttagggactggacttgcagtgtaaacagagacgctgcaaattgcttgtggacggtgtaggccgctgcaggccaccatgaaccggcttccggatgactacgacccctacgcggttgaagagcctagcgacgaggagccggctttgagcagctctgaggatgaagtggatgtgcttttacatggaactcctgaccaaaaacgaaaactcatcagagaatgtcttaccggagaaagtgaatcatctagtgaagatgaatttgaaaaggagatggaagctgaattaaattctaccatgaaaacaatggaggacaagttatcctctctgggaactggatcttcctcaggaaatggaaaagttgcaacagctccgacaaggtactacgatgatatatattttgattctgattccgaggatgaagacagagcagtacaggtgaccaagaaaaaaaagaagaaacaacacaagattccaacaaatgacgaattactgtatgatcctgaaaaagataacagagatcaggcctgggttgatgcacagagaaggggttaccatggtttgggaccacagagatcacgtcaacaacagcctgttccaaatagtgatgctggtcttgaattgtcctgcctgcatgaccacactcttgccttgattgccaaaggcatgaatcatacaaaaactcaatatagagcaatgtttgtaatgaattgttctattaacaaagaggaggttctaagatataaagcctcagagaacaaggaagaaaaggcgggtccataagaagatgaggtctaaccgggaagatgctgccgagaaggcagagacagatgtggaagaaatctatcacccagtcatgtgcactgaatgttccactgaagtggcagtctacgacaaggatgaagtctttcattttttcaatgttttagcaagccattcctaaacagcccaactggcatttaattacccaatactgtatataaggcaaatatggacagttactttcctcttgcctgttcatatccttcagtgacattgaggaagcagtgtttctctttttaaaggagaatagttgtcaaccttcattcatctcttacatctctcaccctctccttttttttttctttgattttcccccttattgatgggactgatattcattctgtttttgatgaacatttggaaactgtcgggctttttattaaagctctgtagaattaaaatgttctggaattataagcaatctttgtttctgagtgttatttttattttggatatagctttgatgtaattaaactggaaactctttcctgaattgtctgtaaaaaaa

SEQ ID NO: 37 - DNA, 4362 bp, Homo sapiens
acggcgagcgcgggcggcggcggtgacggaggcgccgctgccagggggcgtgcggcagcgcggcggcggcggcggcggcggcggcggcggaggcggcggcggcggcggcggcggcggcggaggcggcggcggcggcggcggcggcggcggctgggcctcgagcgcccgcagcccacctctcgggggcgggctcccggcgctagcagggctgaagagaagatggaggagctggtggtggaagtgcggggctccaatggcgctttctacaaggcatttgtaaaggatgttcatgaagattcaataacagttgcatttgaaaacaactggcagcctgataggcagattccatttcatgatgtcagattcccacctcctgtaggttataataaagatataaatgaaagtgatgaagttgaggtgtattccagagcaaatgaaaaagagccttgctgttggtggttagctaaagtgaggatgataaagggtgagttttatgtgatagaatatgcagcatgtgatgcaacttacaatgaaattgtcacaattgaacgtctaagatctgttaatcccaacaaacctgccacaaaagatactttccataagatcaagctggatgtgccagaagacttacggcaaatgtgtgccaaagaggcggcacataaggattttaaaaaggcagttggtgccttttctgtaacttatgatccagaaaattatcagcttgtcattttgtccatcaatgaagtcacctcaaagcgagcacatatgctgattgacatgcactttcggagtctgcgcactaagttgtctctgataatgagaaatgaagaagctagtaagcagctggagagttcaaggcagcttgcctcgagatttcatgaacagtttatcgtaagagaagatctgatgggtctagctattggtactcatggtgctaatattcagcaagctagaaaagtacctggggtcactgctattgatctagatgaagatacctgcacatttcatatttatggagaggatcaggatgcagtgaaaaaagctagaagctttctcgaatttgctgaagatgtaatacaagttccaaggaacttagtaggcaaagtaataggaaaaaatggaaagctgattcaggagattgtggacaagtcaggagttgtgagggtgaggattgaggctgaaaatgagaaaaatgttccacaagaagaggaaattatgccaccaaattcccttccttccaataattcaagggttggacctaatgccccagaagaaaaaaaacatttagatataaaggaaaacagcacccatttttctcaacctaacagtacaaaagtccagagggtgttagtggcttcatcagttgtagcaggggaatcccagaaacctgaactcaaggcttggcagggtatggtaccatttgtttttgtgggaacaaaggacagcatcgctaatgccactgttcttttggattatcacctgaactatttaaaggaagtagaccagttgcgtttggagagattacaaattgatgagcagttgcgacagattggagctagttctagaccaccaccaaatcgtacagataaggaaaaaagctatgtgactgatgatggtcaaggaatgggtcgaggtagtagaccttacagaaatagggggcacggcagacgcggtcctggatatacttcaggaactaattctgaagcatcaaatgcttctgaaacagaatctgaccacagagacgaactcagtgattggtcattagctccaacagaggaagagagggagagcttcctgcgcagaggagacggacggcggcgtggagggggaggaagaggacaaggaggaagaggacgtggaggaggcttcaaaggaaacgacgatcactcccgaacagataatcgtccacgtaatccaagagaggctaaaggaagaacaacagatggatcccttcagatcagagttgactgcaataatgaaaggagtgtccacactaaaacattacagaatacctccagtgaaggtagtcggctgcgcacgggtaaagatcgtaaccagaagaaagagaagccagacagcgtggatggtcagcaaccactcgtgaatggagtaccctaaactgcataattctgaagttatatttcctataccatttccgtaattcttattccatattagaaaactttgttaggccaaagacaaatagtaggcaagatggcacagggcatgaaatgaacacaaattatgctaagaattttttattttttggtattggccataagcaacaattttcagatttgcacaaaaagataccttaaaatttgaaacattgcttttaaaactacttagcacttcagggcagattttagttttattttctaaagtactgagcagtgatattctttgttaatttggaccattttcctgcattgggtgatcattcaccagtacattctcagtttttcttaatatatagcatttatggtaatcatattagacttctgttttcaatctcgtatagaagtcttcatgaaatgctatgtcatttcatgtcctgtgtcagtttatgttttggtccacttttccagtattttagtggaccctgaaatgtgtgtgatgtgacatttgtcattttcattagcaaaaaaagttgtatgatctgtgccttttttatatcttggcaggtaggaatattatatttggatgcagagttcagggaagataagttggaaacactaaatgttaaagatgtagcaaaccctgtcaaacattagtactttatagaagaatgcatgctttccatatttttttccttacataaacatcaggttaggcagtataaagaataggacttgtttttgtttttgttttgttgcactgaagtttgataaatagtgttattgagagagatgtgtaatttttctgtatagacaggagaagaaagaactatcttcatctgagagaggctaaaatgttttcagctaggaacaaatcttcctggtcgaaagttagtaggatatgcctgctctttggcctgatgaccaattttaacttagagcttttttttttaattttgtctgccccaagttttgtgaaatttttcatattttaatttcaagcttattttggagagataggaaggtcatttccatgtatgcataataatcctgcaaagtacaggtactttgtctaagaaacattggaagcaggttaaatgttttgtaaactttgaaatatatggtctaatgtttaagcagaattggaaaagactaagatcggttaacaaataacaacttttttttctttttttcttttgttttttgaagtgttggggtttggttttgttttttgagtcttttttttttaagtgaaatttattgaggaaaaatatgtgaaggaccttcactctaagatgttatatttttcttaaaaagtaactcctagtaggggtaccactgaatctgtacagagccgtaaaaactgaagttctgcctctgatgtattttgtgagtttgtttctttgaattttcattttacagttacttttccttgcatacaaacaagcatataaaatggcaacaaactgcacatgatttcacaaatattaaaaagtcttttaaaaagtattgccaaacattaatgttgatttctagttatttattctgggaatgtatagtatttgaaaacagaaattggtaccttgcacacatcatctgtaagctgtttggttttaaaatactgtagataattaaccaaggtagaatgaccttgtaatgtaactgctcttgggcaatattctctgtacatattagcgacaacagattggattttatgttgacatttgtttggttatagtgcaatatattttgtatgcaagcagtttcaataaagtttgatcttcctctgctaaattgatgttgatgcaatccttacaaatgattgcttttaaaattttaagctaggaaaagaaatctatagaaagtgttctgttacaaaatgtaactgttaccattggaaatttcacgtcataggaagttagcctttatctacccaactttcaagaaggttctttaataaagcgaaaactcaaccaaatggtacttttccacagtgtaccattaaaatatgcactagtctctttttacaaggctgtattcagcaagggcctaacttgcttaaagtgtaattactaacttctaaaactgtactttgattcacatgttttcaaatggagttggagttcattcatattacaatatttgtgtgctaaacgtgtatgtttttcagttcaaagtcatgatgtttttaaaatcttattaaagtttcaaaaatctgaagattgtttatctagatgtaaatttt

SEQ ID NO: 38 - DNA, 2060 bp, Homo sapiens
gagagagttggttggtgttgggccggaggaaagcgggaagactcatcggagcgtgtggatttgagccgccgcattttttaaccctagatctcgaaatgcatcgtgattcctgtccattggactgtaaggtttatgtaggcaatcttggaaacaatggcaacaagacggaattggaacgggcttttggctactatggaccactccgaagtgtgtgggttgctagaaacccacccggctttgcttttgttgaatttgaagatccccgagatgcagctgatgcagtccgagagctagatggaagaacactatgtggctgccgtgtaagagtggaactgtcgaatggtgaaaaaagaagtagaaatcgtggcccacctccctcttggggtcgtcgccctcgagatgattatcgtaggaggagtcctccacctcgtcgcagatctccaagaaggagaagcttctctcgcagccggagcaggtccctttctagagataggagaagagagagatcgctgtctcgggagagaaatcacaagccgtcccgatccttctctaggtctcgtagtcgatctaggtcaaatgaaaggaaatagaagacagtttgcaagagaagtggtgtacaggaaattacttcatttgacaggagtatgtacagaaaattcaagttttgtttgagacttcataagcttggtgcatttttaagatgttttagctgttcaaatctgtttgtctcttgaaacagtgacacaaaggtgtaattctctatggtttgaaatggatcatacgaggcatgtaataccaagaattgttactttacaatgttcccttaagcaaaattgaatttgctttgaacttttagttatgcacagactgataataaacctctaaacctgcccagcggaagtgtgtttttttttaaatttaaatacagaaacaactggcaaaaatgaactaagatttacttttttttccatagctgggatataggctgcagctatagttgaacaagcagtctttaaaaactgctgtgaaacacaggccatcagggaaaacgaaatgctgcactattaaattagaggtttttgaaaaatccaactctcatcctgggcagaggttgcctagttggtatagaatgttaagtttcaagaaagtttacctttgctttaggtcataagttccttatttgattgctgtatatggatacatggctgttcgtgacattctttatgtgcaaatttgtgatttcaaaaatgtcctgccagtttaagggtacattgtagagccgaactttgagttactgtgcaagatttttttttcatgctgtcatttgtaatatgttttgtgagaatccttgggattaaagttttggttacaaattgttctttaacttgaaagcctgtttttccttgcaaactcaaatctgtgagcttggtaccaagtccaggtataacattcctattggaagccatacttatattttcttgtaaagtgcttttgaattaataaaatattagcataattgtgtatagtcagttgaacccactgttaccattgttcttatcccatgggaagcagttggttacacgattcttattttataagaaacagctgagaggcactatggattagtcttctgaagtgaaggaaatatagatgtcacctaagtgatagttaacccattttttttttttttaggcatagaagccagttcagggtccataatatttagtgaccaacattttaaagtatagcagcaacctggttcttaaacacaaagtaagttgcccattaacaaatggcttttatctttagcatgaaaactttccacaggtctaaaaattgcttccattttataatttgaggtgttgcatgggaattctaagctgatccatcatgatgtaaaagttcacaatatggttcaaatgtaacagtgcagaattgaatatggaggcatgcataaccttcctcttagaaaatggcaggtgttgtaatttcaaatttttgtgcaattagattaaatcataatgcaacagtcaaaaaaaaaaaaaaaaaaaaaaaaaaaa

SEQ ID NO: 39 - DNA, 549 bp, Homo sapiens
cctttcctgttaggcgagagctgcgaaaggcgagagctgcgaagggccaggtgtcgggcgctgtttctcgttttcatcatatagacaaaacagccctgctgcaaagatggtcaacgtacctaaaacccgaagaaccttctgtaagaagtgtggcaagcatcagcctcacaaagtgacacagtataagaagggcaaggattctttgtatgcccagggaaggaggcgctatgatcggaagcagagtggctatggtgggcagacaaagccaattttccggaagaaggctaagaccacaaagaagattgtgctaaggctggaatgtgttgagcctaactgcagatccaagaggatgctggccattaagagatgcaagcattttgaactgggaggagataagaagagaaagggccaagtgatccagttctaaactttgggatatttttcttcaattttgaagagaaaatggtgaagccatagaaaagttacccgagggaaaataaatacagtgatattcttacgcaaaaaaaaaaaaaaaaaaaaaaaaaaaaa

SEQ ID NO: 40 - DNA, 531 bp, Homo sapiens
ggcccttcagtatgcgcggacggaagatggcgtccgccacccgtctcatccagcggctgcggaactgggcgtccgggcatgacctgcaggggaagctgcagctacgctaccaggagatctccaagcgaactcagcctcctcccaagctccctgtgggtcctagccacaagctctccaacaattactattgcactcgcgatggccgccgggaatctgtgcccccttccatcatcatgtcgtcgcagaaggcgctggtgtcaggcaagccagcagagagctctgctgtagctgccactgagaagaaggcggtgactccagctcctcccataaagaggtgggagctgtcctcggaccagccttacctgtgacactgcaccctcacggccacccgactactttgcctccttggatttcctccagggagaatgtgacctaatttatgacaaatacgtagagctcaggtatcacttctagttttactttaaaaaataaaaaaatagagacagagtctcaaaaaaaaaaaaaaaaaaa

SEQ ID NO: 41 - DNA, 2971 bp, Homo sapiens
attttaagaaaggacagcattcctgtgacctctgcctaccatccataaaatactcattcccctctcagctctgcctgcagttgaacacaaagacctggaggagactcccacctccttcagggagaagaaaggaggcagcgaagcagattaaaggaacttgtggcttgtggcctttttgtgcaagggccgcctggaaggggagaaaagtgtatgaaagccaccgtggcggttaatgagctgtgagatgaggcgctgctgcggccgctgctgctgacactcgctcccaggctgcacccgccgcccttggcgcttcatgtacatgtgtctattcaggccttgcggaggcgcccagaagagcatccaacacggctgccggggaaagaccgcccaccatgcccacggagaccctacagacaggtagcatggtgaagccggtcagccccgcgggcaccttcacctctgctgtgcccctgcgcatcctgaacaaggggccagactacttccgcaggcaggccgagcccaaccccaagaggctcagcgccgtggagaggctggaggccgacaaggccaagtacgtcaagagccaggaggtgatcaacgccaagcaggagcccgtgaagcccgccgtgctggccaagcccccggtgtgcccggctgccaagcgcgcactgggcagccccacgctcaaagtgttcggcaaccacgccaagaccgagagcggcgtgcagagggagaacctgaagctggagatcctgaagaacatcatcaatagctccgagggctctagctcgggctcggggcacaagcacagctcccgcaactggccgccccaccggtcggaagccactgacctgcaccgtcactccttcgcggagtccctgaaggtctaccccacgcagggccgcaggagcccgcaggagggcggctcccacgtgggcaggagactgctggagcagtcagccgagtccttcctccacgtgtcccacagctcttcggacatccgcaaggtgaccagcgtgaagcccctcaaggccatcccctgcagtagctctgcccctcccctgcctcccaagcccaaaatcgcagccatcgcctccatgaagtcccccgaggccgaccctgtggaaccagcttgtggagtcagccgaagaccctccctccagcggtctaagtcagacttgagtgacagatatttccgagtggacgcggacgtggagaggttcttcaactactgtggactggacccggaagagctggaaaacctgggaatggaaaactttgcaagggctaattctgacataatatccctcaacttccgcagcgcaagtatgatcagctcagactgtgaacagtctcaggacagtaacagtgaccttagaaatgatgacagtgccaatgaccgcgtgccgtatggcatttctgccatcgaaagaaatgctagaatcatcaagtggttatatagcatcaaacaagctagagagtcacagaaggtctcccatgtgtaagacagtgcgtggaaaggagggagcgtgggtctctgtgcttacgcagttgtgaaggttgtgaggtctccttgaagtgttgtgagcttctccactctttgtgttgcttgttgtgcaatgttttcaagttgcatgcttgtcaacatggggactgacctggcttccacgtcaccatcgctacagagcctggctgaacacgcgtcatctgccaaaagtttcaggccagaatctaattagggctttgctcgtaagcaaaactgtttacatgaaaatggtatacaacttcttcgatatttatgtggttcttgtgtttttatatcccgcgctattgtgtcttaattaaaagttttatcaactggcttttaagttgagagcggaatctttttgaaataaaaagccactttgcctacatgtgagactattccagtgggacagtaaatgggatctgctaccaaacagataatgactgaccaaacatagaaccaggctgggttttctgtggaataaagtggtgagcctgacgttaatcgtttacatgttgaaattctcttgccacttagtgaagcagtcattggggtaacaatgctacgttttgtgtccgattcagtgtgtaaacgttggtggttctatgtaatactgaccccaaggaaagacgatcagatacaaagaaagatggttaaatctaggaggttgggtgtttgggggttttgttgatgttgttctgattgggataattcagaaattcctaatattatctttcgacagaatgaccaccctaaaacaaatactgaatgcctttaaaaaaaaaaaagttgtggttttttgtttttttttttttttttttttggtcgagaactactaatttcatgctatttctttctctctccctttgttgttatttgatttgggggaagggagtgaggcttgtgcagatttgagctatctgaagacatgaacagaagtcaaataccagccatatcagtagagccttccattcaaaagtgaacacacttggtagctgaaccatatctgagcagcgtgattctgttgtcttgcatatgttattctctcaggctgtggatctttgttacagctctaggaaactgtagaaatacaatgctatgtagcttttccaccccatggtctctagtgctgcctatcaacttgtccccttttttcccaataacctgtcttccaggtggtacagttagctgtcactcagctgacaccatgatgtggcagcagagagggaaacctacaagtggtttgcctcattgcctttgccacatctgaagttctcagcagcactaccttagacttcatgagctaataggaaactttttatggtgtaaatgctgtaagactttgtacatacttcagttgttatgaaatctttaaagaaaaaaagaaaaagttacgctaataaattgctgtggtgcaggcaaaaaaaaaaaaaaaaaaaaaaaaaa

SEQ ID NO: 42 - DNA, 3823 bp, Homo sapiens
ctattttaccagttggaatgaatgatcagaaatgggcatagtgcttttagatccaacatgtaacagatggatgttactccatgctgattacttcttcaagccagtacttttttgattgtgtaggatctttgtctcttcatctttgaattcaattactggaaaataaaaggagttcatgtagtttttgtccaggcttgagtcaccatgagtagtagtttaggaaaagaaaaagactctaaagaaaaagatcccaaagtaccatcagccaaggaaagagaaaaggaggcaaaagcctctggaggttttgggaaagagagcaaagaaaaagaacctaagaccaaagggaaagatgccaaagatggaaagaaggactccagtgctgcccaaccaggggtggcattttcagttgacaatacgatcaaacggccaaacccagcacctgggactagaaaaaaatccagcaatgcagaggtgattaaagagctcaacaaatgccgggaagagaattcaatgcgtttggacttatccaagagatctatacacatattgccatcatcaatcaaagagttgactcaattaacagaactttatttatacagtaacaaattgcagtccctcccagcagaggtgggatgtttagtaaatctcatgacactggctctaagtgaaaattcacttaccagtttgcctgactctcttgataacttgaagaagctgcggatgcttgatttacggcataataaactgagagaaattccttcagtggtgtataggctggattctctcaccactctttaccttcgctttaatcgtataactactgtggaaaaggacatcaaaaacttgtcaaaactcagcatgcttagcattcgagagaacaaaattaaacaactacctgctgaaattggtgaattatgtaacctcattacgctggatgtagctcacaatcaacttgaacaccttccaaaggagattggaaactgtacacagataaccaaccttgacttgcagcacaatgaactgctagacctcccagatactataggaaacctgtccagtttaagtcgtcttggtctgagatataacagactgtcagcaatacccagatcattagcaaaatgcagtgcacttgaagaattaaatttagagaacaataacatttctactttaccagagagtcttttatcaagtcttgtgaaactgaatagtttgaccttagctagaaattgcttccagttgtatccagtgggtggtccatctcagttttctaccatctattccctcaacatggaacacaatcgaatcaacaaaattccatttggaattttctccagagcaaaagtattaagtaagctgaatatgaaggacaatcagttaacatcacttcccttggattttggaacttggaccagtatggtagaattgaatttagccactaatcagctcacaaagatccctgaggatgtgtctggtctcgtttctcttgaggttcttatcttatcaaacaatcttctaaagaagcttccccatggtcttggaaaccttaggaagttaagagagttggatctagaagagaacaaattggaatccttgccaaatgaaattgcatatcttaaggatttacagaaattagtcttgacaaacaaccagttgaccactcttcccagaggcattggtcaccttactaatctcacacatctgggccttggagagaacctacttactcaccttcctgaagaaattggtacactggagaacctagaagaactgtatttgaatgacaaccccaacctgcatagccttccctttgagctggcactctgcagcaagctttcaatcatgagtattgagaactgtccactcagtcaccttccacctcagattgttgctggggggccttctttcatcattcagttcttaaagatgcagggtccatatcgtgccatggtctgatataaatctgctggtcccacacactgttcaaaaatagactgccattaatgtttcttatctatatctgtatctatttatgtagatattggtatatggcagatttataaaaattgcattatgtgtttctgctaatagaggaatcatagccatttagaattttttttaaattctgtacaaaaggcttatataagttttctttgctgaatttgatggatgtttttctgttgtgtaatctgatatgccagtttgcttaaaacatttgccaacacattatgaagttattaaatttaagggacagaggtagtatagttagatatactttctcttaggaaaaataatgggcaaaaatttttgttgcaacttttcatatatattttccccttaccaattgttttatccttatagtattgtaggccctgaaagtagaatttttctttaacttattttgagatttgagatttaaattttatgtattgtttacagtcagagtaaatcactggatttcttttgtttgttttgatttgctctgttttattcagtcaaatctagagtttgaatcctctgctaaagaatttgcatccactggtgtaaacagtgaaaggtatttgcttgttgaaaaaaaaaactggcaaagtgaaaagatacagtcaaaaatctagaatttctttaattttgcttctctgacgagttgtgaagcaaaatacctgaagtgagtctttgggtaggggaagggtattgagaccttttctagtatgaatattttttaagtttgggggaagagaaacttgcagtgaaaaggagttttttcattcctgaaagttgcagatccacaaaactaacaggataattgggcaaataaattacatataaacacacacaatctatatatgtatatacaatgctatatagatatgtatttattatatcataaactacagtaggtaactttaaggatttcttcctatccttgtacaatgacatgaatgtctttctttgaaaactgcaatgtatgtatgtttcaaggttatttaacagtgtactatggttttatatcttgacttgccttgtacatctttcaattctggaatatctgtgtctaagcacaatatcttcacactgtgctgtattgctgctgaactaaatgcacttttccccacatatggggcactggcttcaaacaattcagttcagtatcattacttttaatctcatctttcctttcttggtagttgttaatacagttatggaaaagaggcacattgcatagaagccattggggagttcagtggaagttctgtaagatgtgcatgtactatttgatgcgttttctttgcttcactgcttttaatacttagcagtattgttggtctaagtcaatttgattattgaggagtctcagagcaaggtgcgttctagatgtcatcctaaaaaacacttcatatataattaatcactattttgtataattacatattgctgcttgtgtgttttttttttttttccatttagttgggcgttgtgttttacacaaaaccatttttgaattaaggctatgatattaagatagaaatttggactgttgttctgcttttcctggcactcaaattcatgactagttttgaggtcaaacctatgttcgtaatgagagattttataaggatcaactaagaaatggaaggcaggtgaagatataaaaccctagaatgcttaaatgtgctgtaaaactattgtagatgtcactggattttaccaagtaatatcctttcttttttttttccccccatctgctgtggcttttcagttaaaattttgtttataaaaggaatttgtttattacagctctacctaaaaaaaaaaaaaaaaaaaaaaa

SEQ ID NO: 43 - DNA, 5189 bp, Homo sapiens
atggccaagtcgggtggctgcggcgcgggagccggcgtgggcggcggcaacggggcactgacctgggtgaacaatgctgcaaaaaaagaagagtcagaaactgccaacaaaaatgattcttcaaagaagttgtctgttgagagagtgtatcagaagaagacacaacttgaacacattcttcttcgtcctgatacatatattgggtcagtggagccattgacgcagttcatgtgggtgtatgatgaagatgtaggaatgaattgcagggaggttacctttgtgccaggtttatacaagatctttgatgaaattttggttaatgctgctgacaataaacagagggataagaacatgacttgtattaaagtttctattgatcctgaatctaacattataagcatttggaataatgggaaaggcattccagtagtagaacacaaggtagagaaagtttatgttcctgctttaatttttggacagcttttaacatccagtaactatgatgatgatgagaaaaaagttacaggtggtcgtaatggttatggtgcaaaactttgtaatattttcagtacaaagtttacagtagaaacagcttgcaaagaatacaaacacagttttaagcagacatggatgaataatatgatgaagacttctgaagccaaaattaaacattttgatggtgaagattacacatgcataacattccaaccagatctgtccaaatttaagatggaaaaacttgacaaggatattgtggccctcatgactagaagggcatatgatttggctggttcgtgtagaggggtcaaggtcatgtttaatggaaagaaattgcctgtaaatggatttcgcagttatgtagatctttatgtgaaagacaaattggatgaaactggggtggccctgaaagttattcatgagcttgcaaatgaaagatgggatgtttgtctcacattgagtgaaaaaggattccagcaaatcagctttgtaaatagtattgcaactacaaaaggtggacggcacgtggattatgtggtagatcaagttgttggtaaactgattgaagtagttaagaaaaagaacaaagctggtgtatcagtgaaaccatttcaagtaaaaaaccatatatgggtttttattaattgccttattgaaaatccaacttttgattctcagactaaggaaaacatgactctgcagcccaaaagttttgggtctaaatgccagctgtcagaaaaattttttaaagcagcctctaattgtggcattgtagaaagtatcctgaactgggtgaaatttaaggctcagactcagctgaataagaagtgttcatcagtaaaatacagtaaaatcaaaggtattcccaaactggatgatgctaatgatgctggtggtaaacattccctggagtgtacactgatattaacagagggagactctgccaaatcactggctgtgtctggattaggtgtgattggacgagacagatacggagtttttccactcaggggcaaaattcttaatgtacgggaagcttctcataaacagatcatggaaaatgctgaaataaataatattattaaaatagttggtctacaatataagaaaagttacgatgatgcagaatctctgaaaaccttacgctatggaaagattatgattatgaccgatcaggatcaagatggttctcacataaaaggcctgcttattaatttcatccatcacaattggccatcacttttgaagcatggttttcttgaagagttcattactcctattgtaaaggcaagcaaaaataagcaggaactttccttctacagtattcctgaatttgacgaatggaaaaaacatatagaaaaccagaaagcctggaaaataaagtactataaaggattgggtactagtacagctaaagaagcaaaggaatattttgctgatatggaaaggcatcgcatcttgtttagatatgctggtcctgaagatgatgctgccattaccttggcatttagtaagaagaagattgatgacagaaaagaatggttaacaaattttatggaagaccggagacagcgtaggctacatggcttaccagagcaatttttatatggtactgcaacaaagcatttgacttataatgatttcatcaacaaggaattgattctcttctcaaactcagacaatgaaagatctataccatctcttgttgatggctttaaacctggccagcggaaagttttatttacctgtttcaagaggaatgataaacgtgaagtaaaagttgcccagttggctggctctgttgctgagatgtcggcttatcatcatggagaacaagcattgatgatgactattgtgaatttggctcagaactttgtgggaagtaacaacattaacttgcttcagcctattggtcagtttggaactcggcttcatggtggcaaagatgctgcaagccctcgttatattttcacaatgttaagcactttagcaaggctactttttcctgctgtggatgacaacctccttaagttcctttatgatgataatcaacgtgtagagcctgagtggtatattcctataattcccatggttttaataaatggtgctgagggcattggtactggatgggcttgtaaactacccaactatgatgctagggaaattgtgaacaatgtcagacgaatgctagatggcctggatcctcatcccatgcttccaaactacaaaaactttaaaggcacgattcaagaacttggtcaaaaccagtatgcagtcagtggtgaaatatttgtagtggacagaaacacagtagaaattacagagcttccagttagaacttggacacaggtatataaagaacaggttttagaacctatgctaaatggaacagataaaacaccagcattaatttctgattataaagaatatcatactgacacaactgtgaaatttgtggtgaaaatgactgaagagaaactagcacaagcagaagctgctggactgcataaagtttttaaacttcaaactactcttacttgtaattccatggtactttttgatcatatgggatgtctgaagaaatatgaaactgtgcaagacattctgaaagaattctttgatttacgattaagttattacggtttacgtaaggagtggcttgtgggaatgttgggagcagaatctacaaagcttaacaatcaagcccgtttcattttagagaagatacaagggaaaattactatagagaataggtcaaagaaagatttgattcaaatgttagtccagagaggttatgaatctgacccagtgaaagcctggaaagaagcacaagaaaaggcagcagaagaggatgaaacacaaaaccagcatgatgatagttcctccgattcaggaactccttcaggcccagattttaattatattttaaatatgtctctgtggtctcttactaaagaaaaagttgaagaactgattaaacagagagatgcaaaagggcgagaggtcaatgatcttaaaagaaaatctccttcagatctttggaaagaggatttagcggcatttgttgaagaactggataaagtggaatctcaagaacgagaagatgttctggctggaatgtctggaaaagcaattaaaggtaaagttggcaaacctaaggtgaagaaactccagttggaagagacaatgccctcaccttatggcagaagaataattcctgaaattacagctatgaaggcagatgccagcaaaaagttgctgaagaagaagaagggtgatcttgatactgcagcagtaaaagtggaatttgatgaagaattcagtggagcaccagtagaaggtgcaggagaagaggcattgactccatcagttcctataaataaaggtcccaaacctaagagggagaagaaggagcctggtaccagagtgagaaaaacacctacatcatctggtaaacctagtgcaaagaaagtgaagaaacggaatccttggtcagatgatgaatccaagtcagaaagtgatttggaagaaacagaacctgtggttattccaagagattctttgcttaggagagcagcagccgaaagacctaaatacacatttgatttctcagaagaagaggatgatgatgctgatgatgatgatgatgacaataatgatttagaggaattgaaagttaaagcatctcccataacaaatgatggggaagatgaatttgttccttcagatgggttagataaagatgaatatacattttcaccaggcaaatcaaaagccactccagaaaaatctttgcatgacaaaaaaagtcaggattttggaaatctcttctcatttccttcatattctcagaagtcagaagatgattcagctaaatttgacagtaatgaagaagattctgcttctgttttttcaccatcatttggtctgaaacagacagataaagttccaagtaaaacggtagctgctaaaaagggaaaaccgtcttcagatacagtccctaagcccaagagagccccaaaacagaagaaagtagtagaggctgtaaactctgactcggattcagaatttggcattccaaagaagactacaacaccaaaaggtaaaggccgaggggcaaagaaaaggaaagcatctggctctgaaaatgaaggcgattataaccctggcaggaaaacatccaaaacaacaagcaagaaaccgaagaagacatcttttgatcaggattcagatgtggacatcttcccctcagacttccctactgagccaccttctctgccacgaaccggtcgggctaggaaagaagtaaaatattttgcagagtctgatgaagaagaagatgatgttgattttgcaatgtttaattaagtgcccaaagagcacaaacatttttcaacaaatatcttgtgttgtccttttgtcttctctgtctcagacttttgtacatctggcttattttaatgtgatgatgtaattgacggttttttattattgtggtaggccttttaacattttgttcttacacatacagttttatgctcttttttactcattgaaatgtcacgtactgtctgattggcttgtagaattgttatagactgccgtgcattagcacagattttaattgtcatggttacaaactacagacctgctttttgaaatgaaatttaaacattaaaaatggaactgtg

SEQ ID NO: 44 - DNA, 1816 bp, Homo sapiens
ctcgccttctggctctgccatgccctgctctgaagagacacccgccatttcacccagtaagcgggcccggcctgcggaggtgggcggcatgcagctccgctttgcccggctctccgagcacgccacggcccccacccggggctccgcgcgcgccgcgggctacgacctgtacagtgcctatgattacacaataccacctatggagaaagctgttgtgaaaacggacattcagatagcgctcccttctgggtgttatggaagagtggctccacggtcaggcttggctgcaaaacactttattgatgtaggagctggtgtcatagatgaagattatagaggaaatgttggtgttgtactgtttaattttggcaaagaaaagtttgaagtcaaaaaaggtgatcgaattgcacagctcatttgcgaacggattttttatccagaaatagaagaagttcaagccttggatgacaccgaaaggggttcaggaggttttggttccactggaaagaattaaaatttatgccaagaacagaaaacaagaagtcatacctttttcttaaaaaaaaaaaaaaagtttttgcttcaagtgttttggtgttttgcacttctgtaaacttactagctttaccttctaaaagtactgcattttttacttttttttatgatcaaggaaaagatcgttaaaaaaaaacacaaagaagtttttctttgtgtttggatcaaaaagaaactttgtttttccgcaattgaaggttgtatgtaaatctgctttgtggtgacctgatgtaaacagtgtcttcttaaaatcaaatgtaaatcaattacagattaaaaaaaaaagcctgtatttaactcatatgatctcccttcagcaacttattttgctttaattgctttaaatcttaagcaatattttttattcagtaaacaaattctttcacaaggtacaaaatcttgcataagctgaactaaaataaaaatgaaaaggagagattaaaggtattccttgttcttcccttctcttcactagtctaaaaacttctttttaatcttaagattctttgtgatgagggtgagaaaaagaatcctcagtttatttttccactattaatctttcttttgataaatcctctattgactgggtagaggtatgtttgtgaaagacatgtaacttggggatttgttactttaggtttgttcccttgaatttcatctcatcaggcaaattgtactagttgtagttacgagttttccctcagtgaagtagcaataggctgtaatcaagaaaatatgccatttatagagataagataaatgaaataatacttcagccaccaggtttttctgtctcacatacataagcagcatttcattgcagatatgggactgattctgtggcttaccttgattaacatcttttggaagttttgctagtgtgctttcctttctttactatgtttctcagattcctttgtatcagggttttgggtgtcacttaggttttgtccatcagattctgtgagacaccaggcatcgttttgaggatgtgggttatacacatggagtgcttctggaactatcagcccacttgaccacccagtttgtggaagcacaggcaagagtgttcttttctggtgattctccaggccatttaataccctgcaatgtaattgtccctctgtggctcacatttcattagtgagccatgaaatcaactcagtgggacatagccagcatttttgcataccaggttgggctataaaatatttctgttgtcaataaattttaaatgttttcctgctaaaaaaaaaaaaaa

SEQ ID NO: 45 - DNA, 1445 bp, Homo sapiens
gtccggaggaggcgttgtgaggtgagctttttcagaagcgcgatcccaggacacgtcgggaagcaagcatccccagagctgcttggaaagaggaccaaagacgtctaaaaagtcatttggaaatatctctaaatatttgttaccatgtataagctgctaaagagaaattgggcccaacaaaactaattgaataattgaggcagatttgtgtgtatcatcaaattctatccagaagttgaagaatctgaatttaaagattgtgtgcatttaataagaggatgacctttcagtttaatttcactatagaagaccatctggaaaatgaattaacacccattagagatggagctttgaccctggattcctcaaaagagctgtcagtctcagaaagtcaaaaaggagaagagagggacagaaaatgttctgcagaacaatttgacttgcctcaggatcacttgtgggaacataagtcaatggaaaatgcagctccctctcaagacacagacagtccactcagtgcagccagcagttcaaggaacttggagccacatggaaaacagccctccttgagagctgccaaagagcatgctatgcctaaagatttaaagaagatgttagaaaataaagtcatagaaacattaccaggtttccagcatgttaagttatcagtagtgaaaaccatcttgttgaaagagaacttccctggagaaaacatagtttcaaaaagcttttcttctcactctgatctgattacaggtgtttatgagggaggcttaaaaatctgggaatgtacctttgacctcctggcttatttcacaaaggccaaagtgaaatttgctgggaaaaaagtcttggatcttggttgtggatcaggtttactaggtataactgcattcaagggagggtccaaagaaattcactttcaagattataacagtatggtgattgatgaagtaaccttacctaatgtagtagctaactccactttggaagatgaagaaaatgatgtaaatgagccagatgtgaaaagatgcaggaaaccaaaagtaacacaactatataaatgccgatttttttctggtgagtggtctgagttttgtaagcttgtactaagtagtgaaaaactttttgtaaaatatgatctcattctcacctcagaaaccatttacaacccagattattatagtaatttgcaccagactttccttagactgttaagtaaaaatggacgtgtacttttggccagcaaagcacattattttggtgtaggtggaggtgttcatctctttcagaagtttgtagaagaaagagatgtttttaagaccagaatactcaaaataattgatgaaggattgaagaggttcataattgaaataacttttaagtttcctggttaattaacattcactgagtatccaaaatgaaataaacagaaggaccaaaaa

SEQ ID NO: 46 - DNA, 6307 bp, Homo sapiens
gcgagcggctgttggaggaaggaggtgggggccgggagcgcaaatggcgttgagatggtycarggccctgttcaaactccagcactgaccattcaccggcggaagcggcggcgcaggaggcggcggcggcccagcgggggcacacagcaggctctgttaccagctccagcagtggcggccagcgagagctaggcccgsgcccggccggcggcgctcgaggcggggagggaagttgcggggccgccgctcctgcccccccaaccgggcttcctatttaccgaaagcagagtccctcgcctctctcggctctcacctgccggccctgctctcccgcgcgagggttccgcgcccgcccgcgggccgtarggagcgggagaaggcggargcggccccgtggccaaagcacccgccaggcttccgaggagaatatgaaactggtgtcaaaatgacatccagatttgggaaaacatacagtaggaaaggtggaaatggcagttcaaaattcgatgaagtcttttccaacaaacggactacccttagcacaaaatggggagagaccacatttatggctaaattagggcagaagaggcccaatttcaaaccagatatccaagaaattccgaagaaacctaaagtggaagaagaaagtactggagatccttttggatttgatagtgatgatgagtctctaccagtttcttcaaagaatttagcccaggttaagtgttcctcttattcagaatctagtgaagctgctcagttggaagaggtcacttcagtacttgaagctaatagcaaaattagtcatgtggtcgttgaagacactgtcgtttctgataaatgcttccctttggaggacactttacttgggaaagaaaagagcacaaaccgaattgtagaagatgatgcaagcataagtagctgtaataaattaataacttcagataaagtggagaattttcatgaagaacatgaaaagaatagtcaccatattcacaaaaatgctgatgacagtactaagaaacccaatgcagaaactacagtggcttctgaaatcaaggaaacaaatgatacttggaactcccagtttgggaaaaggccagaatcaccatcagaaatatctccaatcaagggatctgttagaactggtttgtttgaatgggataatgattttgaagatatcagatcagaagactgtattttaagtttggatagtgatccccttttggagatgaaggatgacgattttaaaaatcgattggaaaatctgaatgaagccattgaggaagatattgtacaaagtgttcttaggccaaccaactgtaggacgtactgtagggccaataaaacgaaatcctcccaaggagcatcaaattttgataagctgatggacggcaccagtcaggccttagccaaagcaaacagtgaatcgagtaaagatggcctgaatcaggcaaagaaagggggtgtaagttgtgggaccagttttagagggacagttggacggactagagattacactgttttacatccatcttgcttgtcagtttgtaatgttaccatacaggatactatggaacgcagcatggatgagttcactgcatccactcctgcagatttgggagaagctggtcgtctcagaaaaaaggcagatattgcaacttctaagactactactagatttcgacctagtaatactaaatccaaaaaggatgttaaacttgaattttttggttttgaagatcatgagacaggaggtgatgaaggaggttctggaagttctaattacaaaattaagtattttggctttgatgatctcagtgaaagcgaagatgatgaagatgatgactgtcaagtagaaagaaagacaagcaaaaaaagaactaaaacagctccatcaccctccttgcagcctcccccagaaagcaatgataattcccaggacagtcagtctggtactaacaatgcagaaaacttggattttacagaggacttgcctggtgtgcctgaaagtgtgaagaagcccataaataaacaaggagataaatcaaaggaaaataccagaaagatttttagtggccccaaacggtcacccacaaaagctgtatataatgccagacattggaatcatccagattcagaagaactgcctgggccaccagtagtaaaacctcagagtgtcacagtgaggctgtcttcaaaggaaccaaatcaaaaagatgatggagtttttaaggctcctgcaccaccatccaaagtgataaaaactgtgacaatacctactcagccctaccaagatatagttactgcactgaaatgcagacgagaagacaaagaattatatactgttgttcagcacgtgaagcacttcaacgatgttgtagaatttggtgaaaatcaagagttcactgatgacattgagtacttgttaagtggcttaaagagcactcagcctctaaacacacgttgccttagtgttattagcttggctactaaatgtgccatgcccagttttcgaatgcacctgagagcacatgggatggtagcaatggtctttaaaaccttggatgattcccagcaccatcagaatctgtccctctgtacagctgccctcatgtatatactgagtagagatcgtttgaacatggatcttgatagagctagcttagatctaatgattcgacttttggaactggaacaagatgcttcatcagccaagctactgaatgaaaaagacatgaacaaaattaaagaaaaaatccgaaggctctgtgaaactgtacacaacaagcatcttgatctagaaaatataacgactgggcatttagctatggagacattattatcccttacttctaaacgagcaggagactggtttaaagaagaactccggcttttgggtggtctggatcatattgtagataaagtaaaagaatgtgtggatcatttaagtagagatgaggatgaagagaaactggtagcctcactatggggagcagagagatgtttacgagttttagaaagtgtaactgtgcataatcccgaaaatcaaagctacttgatagcatataaagattcccaacttattgtttcatcagctaaagcattacagcattgtgaagaactgattcagcagtacaaccgtgctgaggacagcatatgcttagctgacagtaagcctctgcctcaccagaatgtaactaaccatgtaggcaaagcagtggaggactgcatgagggccatcatcggggtgttgcttaatttaactaatgataatgagtggggcagcaccaaaacaggagagcaggacggtctcataggcacagcgctgaactgtgtgcttcaggttccaaagtacctacctcaggagcagagatttgatattcgagtgctgggcttaggtctgctgataaatctagtggagtatagtgctcggaatcggcactgtcttgtcaacatggaaacatcgtgctcttttgattcttccatctgtagtggagaaggggatgatagtttaaggataggtggacaagttcatgctgtccaggctttagtgcagctattccttgagcgagagcgggcagcccagctagcagaaagtaaaacagatgagttgatcaaagatgctcccaccactcagcatgataagagtggagagtggcaagaaacaagtggagaaatacagtgggtgtcaactgaaaagactgatggtacagaagagaaacataagaaggaggaggaggatgaagaacttgacctcaataaagcccttcagcatgccggcaaacacatggaggattgcattgtggcctcctacacggcactacttcttgggtgtctctgccaggaaagtccaatcaatgtaaccactgtgcgggaatatctgccagaaggagacttttcaataatgacagagatgctcaaaaaatttttgagttttatgaatctcacttgtgctgttggaacaactggccagaaatctatctctagagtgattgaatatttggaacattgctagctgctttacctttgcttcaggtgctcggtaatgctggagctatccttagacaaagaaaagtcaagtcatgaaagaagtccttgaagatataccaagaacattcatcagtatcattcgtgtttggatttttaaggccacctgatttcttcgtcatgcattcggcatttgctaaatgacagttactacatcaatctgcaactatcaaaaatgaggggaaaaggttcaggctgttaacaattccatgcagtatttaaatacatttactttggcagagtttataccctccccttgttttcttgctttattctgggcaagtttgaaggggaaaatttgtgctgctgttagtgcaactgctgtgtatgttgagccactgttgtcatgccagccaggtgcaaaggcagcttagctactgaggtagcgaatgttctgaggacattctagacaacagcttagttcctttttcaggctcatttgcttttgcttttttgttgaatgattccaatcgtaaataaagcttttaataattttgtgaattttttggttgttgttccctgaactactgtctatatttaaaattagatggaatccaaagatacacgggattaatagtatatttttttattcttgattaggtttgggttattgaactattttttacttttgagaccacaaccatattcaatatcataccataatgtgtcatagctataggcacaagaaaaacaacagtttgagagaatattatataagatgatgtgccctgttaaaaggaggaggcaaaatagtcaaacccagggtagtttacacttaatgctagggaggctcttaaaacattattagattttgaggaaagactctctagatatattttctaatgttcagtacaataaatataaggaagctaaaacaccaatgtggaattcctgtttccagataacatgtatattcttctatagagtgacaggatcaattgcataagcgcaaagccttaaattgctggtttagagaagacccttttttcattcagattctttgttcgtagagcagttatttgaaaaacagttatggaacacaaaacattttatagatttaatatcataacattgcaaatttttcttgtattattgttcacaccactggttatacttttttttttccttttttattgattgggcctgaatacaggctttctagagatctttttcattaatacttttaaatacctttcaggtagttacatcatgtttcttcattggatttgtaaaacttgaagccataaaaatattagtttggtgtgtattggggaaaatagctaaaagtctaatttttacccatttagactttgttatttccttgtataaagtgacaaatcggggctcttgtatcagtgccagctgtaatgtttttaaatgcagtggctgccttctattgtcttcctatttttgataatgcagattgttgggaaatctgtaaggaagtaactgattccaggcaaattgttttcttccttctacccaccccaacccctacccatcaccttttaagaacatagtacgccagtgtaacgtgggaaccattgagattgtatttgccctgagtattaaagctagcttagcaaaatacttttaaaaacatattggtaaatgatacccataaaattaaattagttatattttattttaaaatgcaaaatacattgatatttattaatcattggatttagggaaagggacagatttttggtgaacctgacttgtggcagatggtaaggaatattataaaacatttggatgagaacaatcagggcgaactgcatttttctgttacactggtaatcatttgaaaattgatttacctcagtgtttaacagttttttgttttgttttgttttttaaataataactaattgtcgagcactgatagagatgcagattttggtggggggaggtggtgggggagataatcacttcaccaactgcagtgcatttgtgtgtttttaaccctcagagaactctgcattttagggtacttgaggctgacttaactaaaagttttaaagtaaccttttttccattgtaaatatttctgtaaatactaccaattggaaattagaacagtagagtacttttctgaatccaatcctatttttattttatacagtatttctcagctgtgatctttggagcaaaagccaacggcaggaaaaaatagtttgtaccagtttcatgaagtatgtctttgggtttttgtaaataattttaactcaaataaaattgctactttcaatac

SEQ ID NO: 47 - DNA, 2135 bp, Homo sapiens
aaagccgaccgagacggagccgctgtcaactctccaactcagctcagctgatcggttgccgccgccgccgccgccagattctggaggcgaagaacgcaaagctgagaacatggacgttaatatcgccccactccgcgcctgggacgatttcttcccgggttccgatcgctttgcccggccggacttcagggacatttccaaatggaacaaccgcgtagtgagcaacctgctctattaccagaccaactacctggtggtggctgccatgatgatttccattgtggggtttctgagtcccttcaacatgatcctgggaggaatcgtggtggtgctggtgttcacagggtttgtgtgggcagcccacaataaagacgtccttcgccggatgaagaagcgctaccccacgacgttcgttatggtggtcatgttggcgagctatttccttatctccatgtttggaggagtcatggtctttgtgtttggcattacttttcctttgctgttgatgtttatccatgcatcgttgagacttcggaacctcaagaacaaactggagaataaaatggaaggaataggtttgaagaggacaccgatgggcattgtcctggatgccctagaacagcaggaagaaggcatcaacagactcactgactatatcagcaaagtgaaggaataaacataacttacctgagctagggttgcagcagaaattgagttgcagcttgcccttgtccagacctatgttctgcttgcgtttttgaaacaggaggtgcacgtaccacccaattatctatggcagcatgcatgtataggccgaactattatcagctctgatgtttcagagagaagacctcagaaaccgaaagaaaaccaccaccctcctattgtgtctgaagtttcacgtgtgtttatgaaatctaatgggaaatggatcacacgatttctttaagggaattaaaaaaaataaaagaattacggcttttacagcaacaatacgattatcttataggaaaaaaaaaatcattgtaaagtatcaagacaatacgagtaaatgaaaaggctgttaaagtagatgacatcatgtgttagcctgttcctaatcccctagaattgtaatgtgtgggatataaattagtttttattattctcttaaaaatcaaagatgatctctatcactttgccacctgtttgatgtgcagtggaaactggttaagccagttgttcatacttcctttacaaatataaagatagctgtttaggatattttgttacatttttgtaaatttttgaaatgctagtaatgtgttttcaccagcaagtatttgttgcaaacttaatgtcattttccttaagatggttacagctatgtaacctgtattattctggacggacttattaaaatacaaacagacaaaaaataaaacaaaacttgagttctatttaccttgcacattttttgttgttacagtgaaaaaaatggtccaagaaaatgtttgccatttttgcattgtttcgtttttaactggaacatttagaaagaaggaaatgaatgtgcattttattaattccttaggggcacaaggaggacaataatagctgatcttttgaaatttgaaaaacgtctttagatgaccaagcaaaaagactttaaaaaatggtaatgaaaatggaatgcagctactgcagctaataaaaaattttagatagcaattgttacaaccatatgcctttatagctagacattagaattatgatagcatgagtttatacattctattatttttcctccctttctcatgtttttataaataggtaataaaaaatgttttgcctgccaattgaatgatttcgtagctgaagtagaaacatttaggtttctgtagcattaaattgtgaagacaactggagtggtacttactgaagaaactctctgtatgtcctagaataagaagcaatgatgtgctgcttctgatttttcttgcattttaaattctcagccaacctacagccatgatctttagcacagtgatatcaccatgacttcacagacatggtctagaatctgtacccttacccacatatgaagaataaaattgattaaaggtttttttggtgagactttatttaaaaaaaaa

SEQ ID NO: 48 - DNA, 8944 bp, Homo sapiens
ggaacattgagcatcctgactttgaaggagtctctgtggtgtttttgtgctaccatacatggggaataatgatgtgaggcagagggagagggaatgaatgggagagccaagagggaagagcgagccggggggaaaggagcgcgcagtgtttcctgctgcggttaggacctcacgccttgccagtacagagctcggtggcaagagccgctgggagctgctcccatcagttagaggatgtggagagggagcaccagaagaggacagcccgcagcctggctcgcagcctgagggacgctgtgggtgctcccagccgggcgagcacgctctgggagcggatctgcaggggagaagcacgcgagcctaacgtgagcgtcccgcctgtcgcgtgtcctgccttggtaagcgccctctccggtccttccacactgaaagcttccagcagagatcaagggaaggagtattgtgtgagacttgcagatttcctcctttctgtctggactggtttgatatttgcctgttgaaaagattactgaacgcagtgtgacaagatgagccgtctagctgcgttctgcttgcctgtgtgtgtgacacgtccaggtgtgaggccaaacctgagaagtgcagactgctcactgatagacgttgctgtaaacagtagtgccctgggtgtacagctggtctcaggatcggagaccccggacttattctctgctcggtgacacggccggcttcctgccgcagagctcctggtttctgttgatggcagttgataattggtagccacagtctgcggtcggagccacagcatttgagtctagcacctggggtgggccctgctgatacagtagagagagagtgaacgaggcagacagaaacacaccccccccccctccacgctcacacactctcccacaccccatgccagctataactgcagctctgagctgcctggagaggagattgccggaagctgaagggatgctttgaacgtgggggggctgcgtcacagttggactcccacttgcagaggacctgattatgtccagtgaccacctgaacaacagcacactgaaggaggctcagttcaaagacctgttcttaaaaaaagcggagctggagttcgcccaaatcatcatcatcgtcgtggtggtcacggtgatggtggtggtcatcgtctgcctgctgaaccactacaaagtctccacgcggtccttcatcaaccgcccgaaccagagccggaggcgggaggacgggctgccgcaggaagggtgcctgtggccttcagacagcgccgcaccgcggctgggcgcctcggagatcatgcatgccccgcggtccagggacaggttcacagcgccgtccttcatccagagggatcgcttcagccgcttccagcccacctacccctatgtgcagcacgagattgatcttcctcccaccatctccctgtccgacggtgaagagccacctccttaccaggggccctgcaccctgcagctccgggaccctgaacagcagatggaactcaaccgagagtccgtgagggccccacccaaccgaaccatatttgacagtgatttaatagacattgctatgtatagcgggggtccatgcccacccagcagcaactcgggcatcagtgcaagcacctgcagcagtaacgggaggatggaggggccaccccccacatacagcgaggtgatgggccaccacccaggcgcctctttcctccatcaccagcgcagcaacgcacacaggggcagcagactgcagtttcagcagaacaatgcagagagcacaatagtacccatcaaaggcaaagataggaagcctgggaacctggtctgattccttccaacgtgcacttcagctggagaaagaaaccaagaagggaagcggccgctgggcccctcctgcgcacagtgttgttcagtttcacatggtacaaataagtaaaaccaaatgagcaaacacggtctttgtttctgattccttttaggggaattgcatgcaaactagactgaaatgatacaaacttccatctggtctgaccgcaaacagtgtttatttggggacaggggttgggatgggggtgtgggcaggggaaaacagagaacgggatgctttgaagataccatgaaataaaacccacagaggtatttgatgtatttaattgtgaaaggagactttgcagataaatgaggccagaatggcatgttttataattaactgaataaagaaggaagcattattatatattattgtggggaagaaccagccagttcgctttttctcctaaggtgtggaacttttattttgttttaaaaatatgaatcaaaattcctgtgttgtgtgccaaggtataaagtggagaagttagatgagtgcaaggagctcctttgtgttgtgatgatgtgttttaaaagttgcactatcttaatgttgaaaatatttacaagggaactgttttacgtgaagttctgtatgttgtcttttcacctgtggattgtaatcaggcccaaggaatatcctggagtggtccccagaagcatccaagaaaagatatttggggacgtagcctaacattttaccaacttacgtaaatcaaaaaagtcattattgttgcaggagtttgcatcaaatagcagtgcatcgctgaagcttttggagacttttggatggaagataagatagggaagattaagttccagcatttctgacttgttattttgagttactctgctactcttaggctgcatagtttatgagaaaatgaacacatgcatttatggatccagtatcatgcagtgctgccctcatcctccagcagtgcaatttcttcagtaatttagatttttttcactatagcatgaaatatattcaaatacataccttattttatgcaataaattgtttaaaatgcaaggtggttattctgcatactgttgaaatatgtgactcctcagtatattcccattgcctctccccctttcctcgacagcttagttcagttctgcagggctgctcagttcacaggaggctcccagcagccaccccacatccagcctacacagaacttcgtgtgggagtggtgtgggtggtggtttcttatgctttggaagcccctagaaataatgacggaagaatgccatgttgctgatcgtggtaataagccattgtgggttattgtatgtcactagtattagcatagcattcttaaaggaatgcagtgttcaaaacctacccaaattcccgcaggattttaccaaacccttccccaggccagttttgtactgaaggcaagaactggacagtcagagaacagtggagggggcaagtgactgaagagcaccgggtaaaaagcacaacatgcagttaaaatgcaactagaaaactaattttaaatattgttagttttaatattcctgatatttacaaatattcattcttatatacaatgaaaaaaataactttcttctgcagatgtaagcactggcttttataagagcagcagccaacacgtttagcagacactgcgcgtggagaagggcttatctgcagtacactctgccatgtggagggtgggcctctgtggcctcttcacataacaagatgagctggaatgatgattccatgactcccacctatgcagccttaaagccaaatccgcgtgtgtgtgtttgtgtctgtctgtgggtctcgaaggtgatccgtcggtgcggtggctctgtgctgtaactggagagactgttccaaaccccaagagttgtctgatcctagtctgttcccttctgcttcttacctctgtagataggtcactggtttttgtttgtttgttttgaggattggaatttccattacattcatcctttgcacacagtaacatccacagaactagtccaactcttaaaaggagagaggaaaaacacaggcaccagttgtcagctcatgcttacaacctgtgtggaagtatatacagttgagagtcacagtggaggttctgagactggattcagtcttgttccagtgacagttggaaggcctctgctggagagacaccagctctcagggcagagattggcttggggccagaaggaccctccccaaccctggagacaccctgaaggttcactggctctccagattagcctctcttcctctgtcaggcaaagatgaggagcccgtgttcccatcgggccctgctggcagggacttgcagtggattcttggtcaggtgtgcccacagatgcggaggcgaggtgagtgattccatcatttcagttctcacctgcagttttggtgaagcaggagatgcaccccacagctctagctctcaaatggcttcacagtccttacttctctacctgcctcaagaaggggctcagagcagagacttgtgaattccttagtaactgtgagtatatgaatgtgttgcacatgtccacagtattggcgagataattacataattcagatacctttaatcatctttcaagaaagaggctcctcccattcaaccaccctagagaactgcctttgttaaatagttatttaaagactcatacatatcaaaccatgactttgaaaggtcttcgaggctggggctctgtaatgaattagtttaaaagccaaggtcataacatgaattgatggtcaatttcccttcagcagaaggaaaaggtgatttagatcagtagctcttttgaaggttgtggctgacctgttcataccgtgtcgcctcatggctagtgtggcgttgaaagagtagcgactgggaagatacaacttacacagtggggcctattgttctttcaagaaccctttttttagcttatagaacccatgggtccagtttagtaacgagtgatttaggcaatcaatgataggtttataatcttagattattccagcaaagtgtggattgcattgttaggaagaacatttggtgggaatgaacactcctgggcataccgctgacttttgtcccttgttcccggtgtaggagacccaaggcatcttgaatcccatctataagaacacaatcttccagcatacgtttgctttttcagaaactctagcattctctttaaatactgacgcaatccttaatggaaaagagatttcatgaagcaaattatgtatttcaatagttcttctatttttagtgtccaaaatttactaatacagaagcttgacaagcatgtcctcaccctccccaccacataaacacatggacacacacccaagccacaagaaatcccaagagagcagaagcgaatttttaaaagatttatcgtgaggactgcatttccattcactaattttggctcaaacttatgaggcaggaaataggggccaacagtaaatgggggaggcctcctgacaccagcagaggaattttgtacccaggcgaggacttcttgaacttctgcgtatctccgtttgatctctttcacctttatttcatcttcataagaatgagaaaggctcaaaaggaagcacttttagaaatcttctctgacctagaagaatccatccaaatccctgccttcctctctgaaccaacagttcccttctctgacaggggccatcctctatcttccatccagcggctcttctttttaggaaggctctggtgcagagcacttcaaatatgtcctcaggccagatactgattgctagtagagagacacccggcacccagtccgaagccctccctcaaaggaccggctcatggcgttggtcactggcaggctcagagacattctgctgtgggcgcagggagcccggccccccatgcagccatgactggatgcgcccccatctcgggggcttgctgcactgcttgtttattgaattttgctacttagaatggcaacattaactttgtgtaccattcattttttaaaaattttccaaagctcggcagtgtatgaaagaaaaaactgggaaagatacttggtttctgttaacttttgtgttgcttgcttaagtgattaaagccagtgcttggagccaagccttcatgccacgaacatgctccacagcctgccctttgctctcctgctcacactgaccaagaatgccgcgtgcttggcctactgaggtgaaaggacaattgaatgacaggtgggcaaagggagaacttccccttcttggtgcgaggaaagtcacaaatttaaaaatgttgcttccagcccagatcctaaatgctagttctcagcagctgcgtggcttaccgttcgccatttccaccaccgccagctgccagcaccgctacagatcacagagatgtgaacagacaatggaaagcactcttagccttgcagtggtctacattttttaggaaccaatatttcagcattctttattacccggcacgctgtgtcctttgcagagttcaagtttatgttactgccagggtcagacagtcatttgctgctgctgctgctgctgctgcttctcgaactggatgcattaggaagctgctgtctgagtgtaggaatgtcttgctaagaaagcaatgtcttccttcatccttttctttcttccctctgcgtgtccttgtttttgtgtaatgcgggagagggttagagctatagagattatatatacactatccgtgcacattatatatatgtagatatacccctatcatgtcagagatctgcatgtcagtttttcagcaactaaggtgcctcatgttctgagttcagcagatataggaaccaagccgccccctcctgcacttgatgctcccacctttgttgtgcctcacttaaaatggtgcttttttcagttgtctgtcttttcttatgtttttatttgtaaggtgctgtatataagttgaatatattatgcacatatcctacccaatgggtagaacaaaaagttgttaatactgtaatataatgtatagatgataccaattttaacagaaatggcatagaatttgtgaatgcctatgtgctttgtcctcttttgtaaggaaatttgcaaatggatgcatacagattaaagtctatgtagtttattttcctattaaatatcaatattataacacaagagaaagaagtgtgaacaaacaagcaacagtttatgaccagcgtatatatagcaatggaaagttgcatctttgctgtgaaaacactttaaagaaaatactttttaaaaaatcccacagctttttggttgccactagacgcttcttattttaatcattttagtaatgctcagctggaccagtgttagttatatttgagtcagaaaaatgttgtttttcaacttgctttataatctcctgcatctatctcctgctgtagcatcacgaaggtgtcaggcaacagtgaaaagtgcacatttttgttgttgcagaaactgtgtcagaggaataagtaaatcagcctgcagcagaagactttgttcagctccagaggcatctgtgaccgtctgtgtccaagtctctctgtgcctttttcttttacaaactgaagctgtggagccaatgaagtaacagtagagattgtagggaaagaatacctcaggaaaaacaaatacacttacaagaagaccctgttcttagaaaatgtgtttagttatgggttagcactagaagagacttggctgtcagccagccaagtgaaggacctctcatccattcccattcatgtcccatcataatacggacccaaaaagcaaactcggttttgccatcagttagaaattacgttttggattgtatattgttacatctctcttccagcttagtttttagtgtctgattgtgacctctgcatttatcttcaaataccctaattttaaaacaaaagaacaagaaaagtttataacaccatgttcactaaaaccacggttgaatcttgggtgtgggcatcctttcgagtgttgtccataagagcagttcgtggaattttgcccatctgacccatattatcagcttattctgccaccagagtagagtctaataaattccaaagtttttatttgctccatggtgtatgttctgactttgaaaatgtcagattctataatcatacccctaacatccaggaaacaaatgacagattatctttaaactgaaattgactctacaatgcaacccttaatgctgaatggattaaaaaagtcagcccttttagtatctgtttgaaagggccgtaaaaagttgacacttttgttgttgtggatcctgcgtgtctagacccacgtgttgtttccatcgtatactgtagggtgcaccccttgggattcatcattaagaactgaggctcactgttgtcagaaacaaagctcccaccccccaggttcaaccttgtgggagaactgttgagcatgagaatgttctagactcagaggtactaaaatttgttaccacatcattgcttcctttctacaggacgaattgaggcttaaactttactgttaatgatactggttcattttaatgtgcttgttggtatgttgctatttttcatttcatagctttcaaaaatcatgctaattgtatacttgtctagtttaaggctattttaaaatatgtacaatactattcacagcatttagttcgtttaatttttattataaagcaatctactaaaaaagtacaactgtatttgaacttttcaatagttgtttgtgagctatgataatcaaaagtcattaaagtcttttttaacaaacattcgtgcttacttttcaacataattcccagttatatacagaaaaagatttccacctgtcacgtatctgcctcttttacctgagcaatggtgtagttcttagacctaaggtctgtaattgcaatacttttaaagaaagatgttgctctaagtgctgtttgttagttatgaaatcagatttttctgcttgttcttaatgctgtggtcaaaccatagcacaaaatcattaaaaataatcagcggcatac

SEQ ID NO: 49 - DNA, 6520 bp, Homo sapiens
ggcatcttttcaggatttcattcctacgtccaactgccgttcacaactgccctttccaactgctccagaactcttggccctggcattccgtgatgtaaattattccacacatggctcaaaagggtgtgaagctgtgtgccaggtgtcggatcactagtttgtcatggatgatgatgatgactcgtgtctccttgatcttattggagacccacaagcattgaactattttctacatggacctagtaataaatctagcaatgatgacttgactaatgcaggatattctgcagccaattcaaattcaattttcgccaactctagtaatgctgatcctaagtcatccctcaaaggtgtaagcaaccagcttggagaagggcccagtgatggactgccactttcaagtagcctccagtttcttgaagatgaactcgagtcttctcctcttcctgatctcactgaggaccaacctttcgacattcttcagaaatccttgcaagaggccaatatcactgaacagacattggcagaagaggcatatttggatgccagtataggttcaagccaacagtttgcacaagctcagcttcatccttcttcatcagcatcctttactcaggcttctaatgtttctaattactcaggtcagacgctgcagcctataggggtgacgcatgtgcctgttggagcatcgtttgcaagcaatacagtgggtgtacaacatggctttatgcaacatgtggggatcagtgttcccagccagcatttgtctaatagcagtcagattagtggttctggtcaaatacagttaattgggtcatttggtaatcatccttccatgatgactattaataacctagatggatctcaaatcatattaaagggcagcgggcagcaagccccatcaaatgtgagtggagggctcctggttcatagacagactcctaatggcaactccttgtttgggaactctagttccagtccagtagcacagcctgttaccgttccatttaacagcacaaattttcaaacatctttacctgtgcataacatcatcatacaaaggggtcttgcaccaaattcaaataaagtcccaattaatatacagccaaagcctatccagatgggtcagcaaaatacatacaatgtgaacaatttgggaattcagcagcaccacgtacaacaagggatctcttttgcttctgcaagctcaccccagggctcagtagttggtccacacatgtctgtgaacattgtaaaccaacagaacacaagaaagccagtcacctcacaggcagtgagcagcactgggggcagtattgttattcattcccccatgggccaacctcacgcaccccaaagtcagttccttatacctacaagcctttctgtcagttccaactcggtacaccacgtccagactataaatgggcaacttcttcaaactcaaccctctcagctcatttctggccaagtggcctcagagcatgtcatgttgaacagaaactcttccaacatgctcaggaccaaccaaccatatactggaccgatgcttaacaaccagaatactgctgtccacttagtgtctgggcagacatttgctgcctctggaagtccagtgatagccaatcatgcctctcctcagcttgtgggtggacagatgcccttgcagcaggcatccccaactgtattacacctgtcacctgggcagagcagcgtttcccaaggaagacctggcttcgccaccatgccatcggtgacaagcatgtcaggacctagtcggttccctgctgtcagctcagccagcactgcccatcctagtcttgggtctgcagttcagtctggttcatcaggatcaaactttacaggagatcagctgacccagccaaacaggactccagtaccagtcagtgtgtctcatcgtcttccagtttcttcttccaagtctaccagcaccttcagtaacacacctggaacaggaacccagcaacaattcttctgccaggctcagaaaaaatgtctgaatcagacttcccccatttctgctcccaagaccacagacggcctgaggcaagcacagatccctgggctcttgagcaccacactgccagggcaggattctggaagcaaagttatatccgcatccttaggaaccgcacaaccacagcaggaaaaagtagttggatcatctcctggccatccagctgtgcaggtggagagtcattcgggaggacaaaaaaggcctgctgcgaaacagctaacgaaaggagctttcattctccagcagttgcagagggaccaagcccacactgtgacaccagacaaaagtcacttccgatcactaagtgatgcggtacagagactgctctcctaccacgtgtgccagggctccatgcccactgaagaagacttgagaaaagtggacaatgaatttgagacagttgccactcagctcctaaaaaggacccaagctatgcttaacaaatacagatgcctgctcctagaagatgccatgcgaatcaatccctctgctgagatggtgatgatcgataggatgttcaaccaggaggaaagagcttccctgtcccgagacaagcgtttggcacttgtagaccctgagggttttcaggctgatttctgttgttccttcaaacttgataaagctgctcatgagacacagtttggccggagtgaccagcatggcagtaaagcaagcagctctctgcaaccgccagccaaggcccaaggcagagaccgagccaaaaccggtgtgacggaacccatgaatcatgaccagtttcatctagtgcctaatcacatcgtggtctctgcagaaggaaacatttctaaaaaaacagaatgccttggcagagcactgaaatttgacaaagtgggcttagtgcagtaccagagcacgtctgaagagaaggccagccggagagagcctctgaaggccagtcagtgctctcccggccctgaggggcaccggaaaacctcatccagatcggatcatggtactgagagcaaactgtcaagcatcctagcagattcgcacttggagatgacgtgtaacaattccttccaggacaaaagtctgaggaattctccaaagaatgaagttttacacacagacatcatgaaagggtcaggcgaaccccagccagatctccagctgacaaagagcttggaaaccacatttaagaacatcttggaactcaaaaaggcgggacggcagccccagagtgaccccacggttagcggctctgttgagttagatttccccaacttttctcctatggcttcacaggaaaactgcctggaaaagttcatcccggaccacagtgaaggtgttgtagaaactgactccattttagaagcagctgtaaatagtatcctagagtgttaatagcagcagtcctccccctaccccgccccgagaccccaccccgagaccccaccccggaccagttacattcgttcctggcaaaagcaaatggaaatggtctcctgtctccagcctgcttgatctttcatcacaggttattctttctaatctcaatcctgttctttgtttaagagcaatacttgtcgtgattacagggagatcctttagtaaaattaatccttggcagaaagcagtctgataggccccactcatttcaagtgttatgaaagtgcttataggcattttgtttatttgttttgttttttaaaaacactgtaactcaatgagaccacagtatacttggcccttggtaaaattttgacaatcataagtcatttgaaaagaacagacttactaaaatcaaacgagacggatagaagctactttttaaagaatatcccactgcatctgcaaatttagttttgggtttttttattattattattttgagtttttttgtgtgtgttttgttgttattgttgaggggaagaccacatggttcttccccctcagccatctttgagcagtaaattgctggctgtgctgccagggacccgcagccctggtggaaaagccagtagcacatacgcagggcattgcagggcttccctattgatggttcaagtgcttttctgatgcttccggagcaaaacctcatgcttttaggcatatctatgttgaatttcacctagggaatgttctgttcttagttacagcagcaaaatttgaaataatttcaccaggctaaataaaggaaaatggaaaccagttaagaggcacagtgtacagaggaggccgggatagagccatgagggttataatattaatatgtatatatgtaaaagcatatatatgttaactattgagaaaaaacaagttttgcattttataattggatatagtcaacatataatgtatgtttttgtttgttgctggattttgtttcatttaacctctctttgcaccctctcccacaacaaataccaagcatcaaaagcactttcatttgaaaattattatgttgtaatttttcagtttaaactttaaggagactctggccttgtttatgcttcttgtctgagaacagtagtgacccctggcagcaattcattaccaaaacacagacaaaccaaaggtaaccagctagcccaccactgaaaggaaagatctgagacatgggattcccatttgagagccaaaggatatgccctgtcatggtttctgtttggcctgtgttcatattagtgagcatggcttactgctttatttatttttatttcttgtcagggagtattctccgttttcctttctcgtatacctgccccaggttatcccatttctgttgttacctttattcttaatgtcattgtaaccatcacttatctcctctcattgggaaagctacatgatagtatttttatgcactcttctcccacacatacacacacgtgcatgtatctgagctgctcggatccagaggtcatttttgttacagtgtgtgcacactcactctccttcttagtgtgcatactctctcatttattctgtttatctccctggctctggaggtgcagccactggtcttcactttaatgtgttgccagaatctgcttctggctgtcgccaacatggggatgacccccattgtcatcatgttgggcatttcttttccagattggcctgtgatggaaaggaaggcttctaattagaaaacacagcaacagaagacctataccccggtgcccctgtgtcccactacacacagaaaaccctgtgagatggccagtcttcataatagcaacgtaccttcaccccagccacatgccccagccaatacaaattggaaaatctggcccattttagggttaccattttttccttatttgtgccaatgtccaagttgcagatttcccctttttcctgtattgtaacatattagataagttggtgtcgccagttggtactttctgtttgggtagtcctagggtaacaccctgccctaaactccatgatttcataggcttttcttcccttggggctcatgctcccctaattcctagcaagatgatccttcctaatcaaattcttctcattgcagaactttatccctggaagccttcatgtgggctgctagtgagttacattaattactgcaaatcagtggaattctcaagagacaagataagcttcatgtacatttgtcacctctctttcttccctatcctgccctgctgtcccaatcctagcttttctatataccatcctaaagggtttttaagccctaacacttgtctagcaaatggagagcctaatttaccaaaatgaaacttgtaaatttttgtgtcattgtatgtaagtttactttttatggaggaaggattctagataatgacaaatgaagattatgacatgtatttcactcctgtgattaggttctacgcacatgggtcataactcgcatgtcgagccccctctagtgaagggtaggagagctcagcctcggatggccaacattcagttgttcaggttcattcgtcaaagttaagttttagaactatttgtactcagtaacaaaaatcattttctttttttttttttttttctgttgtggaaaagcgtgaatttgttattaagcatttgattttctgtgtccttaagtacttcctgaagatgaagcaaaattttaatctggcaattatgaaaaagaaatattttagctctgaaggatttagtagattctgttagattagggaggccttacagactgactttacttaaagaggacgcgtcactcgctgtcagtgtggtgtgggctttatttgcttaaataccttcatttgtatagtacgtctcacttgaaattgctttgtatacattttgtaaaaatatttataaaatgttttgtaaaaaaaaaaaaactataacaaattgcagtttattttgttatgttggataaatactgttaaaagaaaccagtcagtaactatattgttaatccatggttaggaaatgtttagttggagattacaaattgaaacaaccattgcaatacagccaaagatttgggaaaatgaaaaa

SEQ ID NO: 50 - DNA, 4658 bp, Homo sapiens
ggaattccgggaggagcggacgtcggcttctccccgcgggagcccccagcatggttgactatattgtggagtatgactatgatgctgtacatgatgatgaattaactattcgagttggagaaatcatcaggaatgtgaaaaagctacaggaggaagggtggctggaaggagaactaaatgggagaagaggaatgttccctgacaatttcgttaaggaaattaaaagagagacggaattcaaggatgacagtttgcccatcaaacgggaaaggcatgggaatgtagcaagtcttgtacaacgaataagcacctatggacttccagctggaggaattcagccacatccacaaaccaaaaacattaagaagaagaccaagaagcgtcagtgtaaagttctttttgagtacattccacaaaatgaggatgaactggagctgaaagtgggagatattattgatattaatgaagaggtagaagaaggctggtggagtggaaccctgaataacaagttgggactgtttccctcaaattttgtgaaagaattagaggtaacagatgatggtgaaactcatgaagcccaggacgattcagaaactgttttggctgggcctacttcacctataccttctctgggaaatgtgagtgaaactgcatctggatcagttacacagccaaagaaaattcgaggaattggatttggagacatttttaaagaaggttctgtgaaacttcggacaagaacatccagtagtgaaacagaagagaaaaaaccagaaaagcccttaatcctacagtcactgggacccaaaactcagagtgtggagataacaaaaacagataccgaaggtaaaattaaagctaaagaatattgtagaacattatttgcctatgaaggtactaatgaagatgaacttacttttaaagagggggagataatccatttgataagtaaggagactggagaagctggctggtggaggggcgaacttaatggtaaagaaggagtatttccagacaattttgctgtccagataaatgaacttgataaagactttccaaaaccaaagaaaccaccacctcctgctaaggctccagctccaaagcctgaactgatagctgcagagaagaaatatttttctttaaagcctgaagaaaaggatgaaaaatcaacactggaacagaaaccttctaaaccagcagctccacaagtcccacccaagaaacctactccacctaccaaagccagtaatttattgagatcttctggaacagtgtacccaaagcgacctgaaaaaccagttcctccaccacctcctatagccaagattaatggggaagtttctagcatttcatcaaaatttgaaactgagccagtatcaaaactaaagctagattctgaacagctgccccttagaccaaaatcagtagactttgattcacttacagtaaggacctccaaagaaacagatgttgtaaattttgatgacatagcttcctcagaaaacttgcttcatctcactgcaaatagaccaaagatgcctggaagaaggttgccgggccgtttcaatggtggacattctccaactcacagccccgaaaaaatcttgaagttaccaaaagaagaagacagtgccaacctgaagccatctgaattaaaaaaagatacatgctactctccaaagccatctgtgtacctttcaacaccttccagtgcttctaaagcaaatacaactgctttcctgactccattagaaatcaaagctaaagtggaaacagatgatgtgaaaaaaaattccctggatgaacttagagcccagattattgaattgttgtgcattgtagaagcactgaaaaaggatcacgggaaagaactggaaaaactgcgaaaagatttggaagaagagaagacaatgagaagtaatctagagatggaaatagagaagctgaaaaaagctgtcctgtcttcttgagtggtgtggacctggtgttcataatgttccagggattcagaagcaacgctatgaacttcagctgacttgttacttaaaaattgtgaattctgttgttgtgataaatatgagcaaatgaagtgtaatatctatagaaaagtagagtgagggtgaatttatatatatattttgttttgccaatatgaagaaaaagaggccttatttcttaactgtgctgggattgcaaacactttttaaaaaattgtttgcttgaaaatactactgaatataaataagaatgtgctcagtagtttttttattgaaacttgtattatttttaaagagatctatactataaatatggtgatatatttacaagtaatctgtaagatatactatttgagagggacagattagccttttagtaactatagtcactactttttccataatgcataagggatataaactctgtgtgtgtgtgtgtgtgtgtgtgtgtgtgtgtgtgtgtatatatatatatatatttttacttttatcctcttaccgaaggttacactgttgtgcctgtttgtctgcaatgctgtttatattttgggtgatgaaataggagtttcctagctatataaaccagattactcacccatgcatatagtaagaactaatgaataatcaaaataatttcatcaacttttagaatattttatgttgcttgcactataggagtcataaaaggaacttagttaaaatatgttggattgttaaacatttggggaaatatgaactgtattttaaatttgttaggtctgaaaaatctaaaactgttaatttaacccttaacttgtgcctagaaactacagcacatataaaatatgtaaacaccagcctgttgctgtacttttctgcttattttacagcctcaaatatttctcattatcttgtcacttagttcttcatgtttctccttctgacttttaataatggtaataggaaaacaaaacccaaagcttttcaaacttcagtgtgaggtttcctattttgacaagttaacttgtaaatactcaggttttacgatgtataatttacctaatagaccaaactaactcatggagatattttgaactattatttaggtacaaactttataaagaatgttagtatgtcataaaatataacattacagcttatttaaaaccaaatatattgaacatattttaaaatacatttcacagaatggatgaattagttgtttcttcaaaagttacttatgaacagttgaatgcctttaaaatgttctgtctgtaggtacatctaaaaacacaagtgggtttatttaaatttttaaaatttgaaattttttatttgccaaaaattgttttatgctttattatatcgcaaatgagtgtcagatttttgagtaccaatgatcatgcttccattttttttagttttaaaccaccaaaccaatatttttcctttaaattttaatcttataatatagaaatcttatgttaatgaaattttgtcatgtttcaaataaagaaaactgaagtagaaaatagaaatgccagtaaacaacataatgtttaatttacaacttacattaggggtttgggggaatgctaattatatattgagaatatacattagaactcttcaaaatgggctcttctaatgaggtcactactgaacaaaattgttccctcttctgttaaatagaataggtttaaatgactagtcaaatgaattattttctccttgttaaataaattaaatcttactttcttttaatgaccaaccttaggtaaaacaaaaatattgtaatcctagaaattatcctccagctttctcacctgaaaatctattgaagtgatccctggtcatcctaataatgggatgagggaagtttccagcagatttcaggctgttcttaaagtttttgttggtcattttctcaatagtacatgaaatcaagatgcttatgagcatggaaatgtatttaaagtttttgcttgtgtcctcctcagtcagaatagaaaagtaactgaaatactcttacctttctgtccttgataaaatagtaaagaaaaccaaacaaacccaggcctgatgggaaaaatgattcctttattctagcaattactttctgttggtatgggaaatgttattaatttctattactaaagttcatatcacaaaatgatatttaataataaccttggggtaaatcatgaatttttttttctacgtgtgagtataaaagacaaaagttgaacagcatggaatcttcattgccaaattattagtgaatgtatagttcaggtattctttgagacacacagtatcattaatttccgaattgtatttcagtgttattttttgtttgtgaccactaagcttctgtcttaatacaaagctgttaccttctacagaatttaagtctgaagatgtaaagagagaacaggccttgtgtaacagaagatactcttttttatgctccttactgtgatcacagaaaaattaaaaatccaagtgctctctagatttgttgataaacattttatgcttgcatttaaacttgaaatgtatgagcagaatgagacaatcagttaaatcagaaatgagaagtattataatgtaaaggccttgttttgctgtagcaataaaatgaccaagtgcaatgacttgatttaataaaatccggaattc

SEQ ID NO: 51 - DNA, 1337 bp, Homo sapiens
gctgcataaggactgcccggggctgcgcgccgggaacctcgcggggctggcgggcgccgcaccccctccctggccgcctgcgccccggggaggccgcccgcgcgcgacgggaccggcagcatgagcagcggctacagcagcctggaggaggacgccgaggacttcttcttcaccgccaggacctccttcttcaggagagcgccccagggcaagccccgctccggccaacaagatgttgagaaagagaaggaaacccacagttacctcagcaaagaggagatcaaagagaaagttcataaatacaacttagcagtcacagacaagttgaagatgaccttgaattcaaatgggatttacactggcttcattaaagtacagatggaactctgcaaacctccacagacttctccaaattctggaaaactctctcccagtagcaatggctgtatgaatacacttcatatcagcagcacaaacactgtcggggaagtgatcgaggccctgctcaaaaagtttctcgtgactgagagccctgccaagtttgcactttataagcgttgtcacagggaagaccaagtctacgcctgcaagctctcagaccgggaacatccactctacctgcgtttggtagcagggcccagaacagacacacttagttttgttcttcgtgaacatgaaattggagagtgggaagccttcagccttccagaactacagaatttcttgcgcatcttggacaaggaagaagatgaacagctgcagaacctgaagaggcgctacacagcctacaggcagaagctggaagaagccctccgtgaggtgtggaagcctgattaaagcggggctccctgcccgtgaggcccggtgcaggaccgatgtacaaaacagcagcaagtgcctctcttctcagagggctgctgtcttgccccactatgctagggtcttcgcctttctatctgtagattttgttccccaaacctggtcacacagcatcctgcaccttagcgtcccatgtaagggactctgcaagcttgttgttcagcaccgcagtgttacctcttggcaagctgtgaacctgtcgcctcatcaggagcattcgagggtgcttggaagcatgaactctgggggtgtttttttttttggttattttaattatgtgatgatgctgttaagcttacagatatgcagttgattttttaaaaagcttaactaggaatctttctgaatacttgtcctattttgaaactacctgtctggttttttgtttggttttgttttctttttttaatgtcagaggaatctatccatgtgaatcgaaaggcacaggaatctaggaa

SEQ ID NO: 52 - DNA, 1075 bp, Homo sapiens
gagcccctcccctcggcccgcgcgggaggagtgtgacccaggtgccgcttcctctcgccgccgagggtcaggagcccgggagcgcgaccctcccccggcccggcctggcccggcctggccagtccccgcggtctctgcccgggctgacgcccaggaatgtggtcgacgagaagccccaacagcacggcgtggcctctcagcctcgagcctgatccggggatggcctctgcctccaccacaatgcatactaccaccattgcagagcctgatccagggatgtctggatggccggatggcagaatggagacctccacccccaccataatggacattgtcgtcattgcaggtgtgattgctgctgtggccatcgtcctagtctccctcctcttcgtcatgctgcgctacatgtaccggcacaagggcacgtaccacaccaatgaggccaagggcacggagtttgctgagagtgcagatgcagccctgcagggagaccctgccctccaagatgctggtgatagcagcagaaaggagtactttatttgagggacaacagacttcacttccctgaatgcctcccccatctccatcaggaaaaatacaccccatcgcccagcacccctgctgataccaccagacagagagagagagcacttgattcttcccgagatagccacctggaaacactaggtgcctgcccagggaggaacggaggaggactcgcgctacaagaggccactcccagggacccagggaggcgatggccaccccagaggccaccttttgctccacggaggtgggagaaaatctgggcacatggggccccctgggcagtgcaggacaacatcagctcactggcaggaaagtccttgttgagggtgagggggtgctggggtacccgggggctggggaagcaaggaaataagtcatctgtatgctgactggggataatggcatcaaatgtcagtccttgacatttggggggaacagcaggtgccagagctaaaaggtacctttgtctgccattgatccagctcagaacgattggaaataaatttgaaatgtaaccgagcaaaaa

SEQ ID NO: 53 - DNA, 3811 bp, Homo sapiens
tttgcctaaggggataaggaaaaataatgtgaaagttgcagtccttatcagaagtaattgtttgcctaaggggataaggaaaaataatgtgaaagttgcagtccttatcagaagtaattgattagaattcagcaatgaatatgccaaatcgtacttatttcagatgatgcagccaacacgaacggttgtcatgtgtaacacaactttcgatcaccgcgaaaacaccgtcctgggaaagcgtccatgcttgatatcgtttggttcatgaacattaagtttccagtacaggtaaaatcccagaggaatccaaagccctctctttattggctcctgctccaaccatgacaagtctgatgcctggtgcaggattgcttccaataccgaccccaaatcctttgactactcttggtgtttcacttagcagtttgggagctataccagcagcagcactagaccccaacattgcaacacttggagagataccacagccaccacttatgggaaacgtggatccttccaaaatagatgaaattaggagaacggtttatgttggaaatctgaattcccagacaacgacagctgatcaactacttgaattttttaaacaagttggagaagtgaagtttgtgcggatggcaggtgatgagactcagccaactcggtttgcttttgtggaatttgcagaccaaaattctgtaccaagggcccttgcttttaatggagttatgtttggagacaggccactgaaaataaatcactccaacaatgcaatagtaaaaccccctgagatgacacctcaggctgcagctaaggagttagaagaagtaatgaagcgagtacgagaagctcagtcatttatctcagcagctattgaaccagagtctggaaagagcaatgaaagaaaaggcggtcgatctcgttcccatactcgctcaaaatccaggtctagctcaaaatcccattctagaaggaaaagatcacaatcaaaacacaggagtagatcccataatagatcacgttcaagacagaaagacagacgtagatctaagagcccacataaaaaacgctctaaatcaagggagagacggaagtcaaggagtcgttcgcattcacgggacaagagaaaagacactcgagaaaagatcaaggaaaaggaaagagtgaaagagaaagacagggaaaaggagagagagagggaaaaggaacgtgaaaaagaaaaggaacggggtaaaaacaaagaccgggacaaggaacgggaaaaggaccgggaaaaagacaaggaaaaggacagagagagagaacgggaaaaagagcatgagaaggatcgagacaaagagaaggaaaaggaacaggacaaagaaaaggaacgagaaaaagacagatccaaagagatagatgaaaaaagaaagaaggataaaaaatccagaacaccacccaggagttacaatgcatcgcgaagatctcgtagttccagcagggaaaggcgtaggaggaggagcaggagttcttccagatcgccaagaacatcaaaaaccataaaaaggaaatcttctagatctccgtcccccaggagcagaaataagaaggataaaaagagagaaaaagaaagggaccacatcagtgaaagaagagagagagaacgttcaacgtctatgagaaagagttctaatgatagagatgggaaggagaagttggagaagaacagtacttcacttaaagagaaagagcacaataaagaaccagattcaagtgtgagcaaagaagtagatgacaaggatgcaccaaggactgaggaaaacaaaatacagcacaatgggaattgtcagctgaatgaagaaaacctctctaccaaaacagaagcagtataggaccgacaagtgtacctctgcactcaatgctggaatcaaatccaaagcttttaattctctcaacaagatgtaaacaggaaagaaatctagttgagcatgaagataggatctaacagcttttccagttgttagatgactttgtggccatcttgttattgagtaagaaaataaagcatggacatcatgaaaataacagatgttacccaaactcatcttctaaaatctgtgcatttccatggtggctgacacacttgtcatgtggtctgttagtgtttgccaagaaccattgcaaataaattgaacatcaaagatccaagtttgtactatccctaaagactggagataagcattggaggctcttttaaaaaatgctagttactgaattttgtattgttttacttttttttttatttcaatatatacagtttgatgatgtgcttgaaattggtgcaaatatatacacacccttgtaagtgcaaagtatgtaagaagttttaacatttacttcacaggacttgtgattgtgttaaattctcactattgtgttttcttttgctcactgtttaggacaatttttctttaaaatagttttgcagattaaaattgcttaaataagtggattaaaaaactgacaatgcatgctactgttctctttcaaaaggaagagcaaccgtgttgaatactaataatgatgaattagtattcagtgtttagaatcattgggactacccacaaagtgagcatttctttttaaattttcttgacatttccaagcttattatgaataatattgcagtgtgtcttgtcagctgtaggtggcaaaggtgcccttataaaaaaggaaactggcttttcaaaatgggctatgggagcacaagctgaagctttagtgccttctacaatgtggtatactgttttctagaattttatatgtgctagtcattctcaattcatatggaatctagatggatatttcatgcatacccatagagaagtgtgtaagtgatatgtcagaagagcttcttactgatttcacctaaaatgagaaggaagtcctgttttcaagaatgacattagagtcatgcagctttgggaccatcagttttatactgtgataattgaaaatgaaacatgttcttattttccttaaattgaagaaaaccctttagttgtctacattggatggccttattacctctcaatcatcttttcataaatgatgtgcagaaattgtacttaaggacttaggagtatatgggaggttattggttttatgtttaaggatacgtttacttgagtttaagatacaggtcatccatcattcttaggctcactttttacagaaagtatgcaaatagtaaagtgacagcactgctaatgtttttccccagtactataacttgtggtttctgaactcattattgttgtatttccaaaaaagtaataccttttaattagtgtattaaaagttaagtataattattttaatgcaatctaatacaatcagattactcagttgccttacctcatgggaagagttacttttttagatctaaaaagctgaatagcatgttagttacttggtttcaacttgagttttcttttaatgttaataagattgaaactttagtatttagtggggaatggaaagagttgcccttgttgcaagtaatgaagcctgatttgattatgaagctgcttaatcactcttcatgtgttcagaattactgttttttttgtttgtttttcctttttgtcactgtgtacattaaaattttggaagatgctttactatgtaaagtatagatggtcattttaatcattcagccacatacggttggctggtaaacagcttattctgatacaagaatgcttgggtgcatatggaaagattgtgaaagagtgtgtcttgcatcaacagctgtcttatttatgatatataa

SEQ ID NO: 54 - DNA, 2711 bp, Homo sapiens
gggagagggagctctcgggtcggggctagggaaggctgaccccgctcggcccgggtgaaagggcggtgacggcactgggtggggccgagctccagggctggctgctgggctgctaagggaactgtgagccgctcagagccgcgcgcctcccgggcggggcggggccggccgtgggagtccgcgcgtgcccgcgccgagctgcctgctccggcggcttcgctgctagctcgcggcgacgtcgggccgattttcccaggatgacagagctgaggcagagggtggcccatgagccggttgcgccacccgaggacaaggagtcagagtcagaagcaaaggtagatggagagactgcatcggacagtgagagccgggcagaatccgcacccctgccagtctctgcagatgataccccggaggtcctcaatagggccctttccaacttgtcttcaagatggaagaactggtgggtgagaggcatcctgactttggccatgattgcatttttcttcatcatcatttacctgggaccaatggttttgatgataatcgtgatgtgcgttcagattaagtgtttccatgagataatcactattggctacaacgtctaccactcatatgatctgccctggttcaggacgctcagctggtactttctcctgtgtgtaaactatttcttctatggtgagacagtgacggattacttcttcaccctggtccagagagaagagcctttgcggattctcagtaaataccaccggttcatttcctttactctctatctaataggattctgcatgtttgtactgagtctggtcaagaagcattatcgactgcagttctacatgtttggctggacccatgtgacattgctgattgttgtaacacagtcacatcttgttatccacaacctatttgaaggaatgatctggttcattgtccccatatcttgtgtgatctgtaatgacatcatggcctatatgtttggctttttctttggtcggaccccactcatcaagctgtccccgaagaagacctgggaaggcttcattgggggcttctttgctactgtggtgtttggccttctgctgtcctatgtgatgtccgggtacagatgctttgtctgccctgtggagtacaacaatgacaccaacagcttcactgtggactgtgagccctcggacctgtttcgcctgcaggagtacaacattcctggggtgatccagtcagtcattggctggaaaacggtccggatgtaccccttccagattcacagcatcgctctctccacctttgcctcgctcattggcccctttggaggattcttcgcaagtggattcaaacgagcctttaaaatcaaagactttgccaataccattcctggccatggaggcatcatggatcgctttgactgccagtatctgatggccacctttgtcaatgtatacatcgccagttttatcagaggccctaacccaagcaaactgattcagcagttcctgactttacggccagatcagcagctccacatcttcaacacgctgcggtctcatctgatcgacaaagggatgctgacatccaccacagaggacgagtaggggccacccagggccaggagaacaggaacagaactgagcaggggcaggtctccaaggcaagcccagctggtgtgacttagacaatgacgaggcttcaactcactgtcttttttttttttttttggagggtattttttatttgtgggttcaaaaaatctgtatatacagtctatgtgtttagaatttgtgttgtaagtaaactacagctttgagttggaaagaagtcacgggttgtaaaaccatttggatttttttaaaacaaaagtattaataatctggaagacagtgttgcccaggtcaggagtgttttcttggtggttccagcccccatcaattgaactgtttctgggctcagtcagacacagacattcatctgtgtctgaccaaatcaggggacttccccacctgtggtgggaggcacagcttagatgttttgtacacctggtcttttctagaaatccctgcttggagctgcagaagggttgccttctgtaggtcggaggaatggaggcttactaaccaggtaagccttctatgcatccacaccaaaatcctgcagaatgtaagtaagctctgctttataagatgggttcaccttcatcgcagactgaaagtttcagtttttatttttttcagaaagcacgaaaaattatttataatagtctggagaaaaaacacactgtaatatttcaagtgtatgcagtagaatgtactgtaactgagccctttcccacatgtctaggctccaatgtctcctgtaggtccacctaactgtgtgttttcagggacaatgccatccatgtttgtgctgtagacttgctgctgctgaatcctttctggggactttctcatcgggcagggagcagagggcttctcgttcatgcaccctttgcctgaacacccatgtagctgctgtgttgtgtatatattactcttaagaggagtgtgtgtgtctgtgtttgttttaaaagtcacttatttcttacagtgatttcaattgcaccatgacttcttcactaaaaccacaaagtcctgcttaaaactatggaaaacctaacctgattagagccttgactattttgaagattaaatgcacactttttatataaaaaaaaa

SEQ ID NO: 55 - DNA, 3920 bp, Homo sapiens
ttttgtgtttcccgcacagtcaatcaaaataggaaaaaaaaatccccggaccgctccggccgtgtccgccgccgcttcccgcatcctctcccgccgccgccgccttcgctcctcaccatgtgtaaggcggcggggagccccgcctgaggtgccctaaacacactatgaccgctcccgaaaagcccgtgaaacaagaggaaatggctgccttggacgtggatagcggcggcggcggtggcggcggcggcggccacggcgagtatctgcagcagcagcaacagcacggaaacggtgcggtggcggcggcagcggcggcccaggacactcagccgtcaccgctcgctctgctggccgctacctgcagcaagatagggccgccatcgccgggcgacgacgaggaggaggcggccgccgcagccggggcccccgccgccgccggagcgacaggtgatttggcttctgcacagttaggaggagcaccaaaccgatgggaggttttgtcagccacacctacaactataaaagatgaagctggtaatctagtccagattccaagtgctgctacttcaagtgggcagtatgttcttccccttcagaatttgcagaatcaacaaatattttccgttgcaccaggatcagattcatcaaatggtacagtgtccagtgttcaatatcaagtgataccacagatccagtcagcagatggtcagcaggttcaaattggtttcacaggctcttcagataatgggggtataaatcaagaaagcagtcaaattcagatcattcctggctctaatcaaaccttacttgcctctggaacaccttctgctaacatccagaatctcataccacagactggtcaagtccaggttcagggagttgcaattggtggttcatcttttcctggtcaaacccaagtagttgctaatgtgcctcttggtctgccaggaaatattacgtttgtaccaatcaatagtgtcgatctagattctttgggactctcgggcagttctcagacaatgactgcaggcattaatgccgacggacatttgataaacacaggacaagctatggatagttcagacaattcagaaaggactggtgagcgggtttctcctgatattaatgaaactaatactgatacagatttatttgtgccaacatcctcttcatcacagttgcctgttacgatagatagtacaggtatattacaacaaaacacaaatagcttgactacatctagtgggcaggttcattcttcagatcttcagggaaattatatccagtcgcctgtttctgaagagacacaggcacagaatattcaggtttctacagcacagcctgttgtacagcatctacaacttcaagagtctcagcagccaaccagtcaagcccaaattgtgcaaggtattacaccacagacaatccatggtgtgcaagccagtggtcaaaatatatcacaacaggctttgcaaaatcttcagttgcagctgaatcctggaacctttttaattcaggcacagacagtgaccccttctggacaggtaacttggcaaacgtttcaagtacaaggggtccagaacttgcagaatttgcaaatacagaatactgctgcccaacaaataactttgacgcctgttcaaaccctcacacttggtcaagttgcggcaggtggagccttcacttcaactccagttagtctaagcactggtcagttgccaaatctacaaacagttacagtgaactctatagattctgctggtatacagctacatccaggagagaatgctgacagtcctgcagatattaggatcaaggaagaagaacctgatcctgaagagtggcagctcagtggtgattctaccttgaataccaatgacctaacacacttaagagtacaggtggtagatgaagaaggggaccaacaacatcaagaaggaaaaagacttcggagggtagcttgcacctgtcccaactgtaaagaaggtggtggaagaggtaccaatcttgggaaaaagaagcaacacatttgtcatataccaggatgtggtaaagtctatgggaagacctcacatctgagagctcatctgcgttggcattctggagaacgcccttttgtttgtaactggatgtactgtggtaaaagatttactcgaagtgatgaattacagaggcacagaagaacacatacaggtgagaagaaatttgtttgtccagaatgttcaaaacgctttatgagaagtgaccaccttgccaaacatattaaaacacaccagaataaaaaaggtattcactctagcagtacagtgctggcatctgtggaagctgcgcgagatgatactttgattactgcaggaggaacaacgcttatccttgcaaatattcaacaaggttctgtttcagggataggaactgttaatacttccgccaccagcaatcaagatatccttaccaacactgaaatacctttacagcttgtcacagtttctggaaatgagacaatggagtaaatattacacaaatacttattcattgtggttatttttatacagtagtgagaagaatattgttcctaagttcttagatatctttttattgatgtgcaaaaatttttggattgacagtaacttggttatacatgacactgaaatgccttactttgtatgatattccatagtatattaaaaatggtaaaattgcatgggttttgtaggtacttttggaatctagaagaaatgaaattttaccaagttatataaagagaaaattgaatttaacaatgcgaatggtagtctaaccaaatgcatcaatcctgtgtggtttagtgtaaaaatgagaacatgttggtatttatctattgtaagataaaaaagctggtgggtgaaagaaatcatgttatgataaaaaattttgtaattttcttgatgactggaatttttattatgcataactgacaaatcaagtttccaagcaaatgttacatagtgtaggctttacttagcttatcaatttgtcattttgaagctaattattttaattaggttaactatgtacaatattttaagcattactcttgtaagattttgaaaactacattttaacatggaactctagggatagtcaccttttaaatcctgttgaaaagccatgtttaagatttaatttgccaaaataatgtcttgttaatattctttcaataacgaagttgggcaatataaccaatgtttaaaaaagtttaaaatgtataagttgaggcatttgggtggtaagagaatgttatagtgaattatcccttttcttgactattggaggaccaaaaaaataaggtgtattgcgtcttagcagtgatttttatccaatcttgtttccaaaaaccatgtctcccagggccttaaaagccatcatgtaaattaccagtaaagtgtaacatatgcaaacataacaaaatcacttccatagtgacgatactccaaccatatggatattagtcatagaagaactagaggttttatgatatttttttaagtcttttttttttttgtctaggtagtcagtctgcacttaaatatcaatcattttccttttttgcttcttcccttaaaatttatatgtatccagtacatttaattgagaagcgtatgttttttattatgctgtattttctttttattttttaattattgtttatattttcaattcaaaaatgtacaaaataaagttacattgctggtcttgtaagagctatacagttttcctaaatgtatacctgtaactgcagcagttcacctatttcaaaaatttggaattctgttcatttgttattcttaagaccacctcaaatttaaaggctaccttattgtacgtttaaagtgtattataacagtgtggtagttaataaaacactatttttttttcttttg

SEQ ID NO: 56 - DNA, 5963 bp, Homo sapiens
gtgagaaggcggcggcggcggcggagtagcagccggacgagacgtcccagcggctcaggcgctgcccagcgccggccctggcagggagcctggtggggtggcggagggggagactgtgccgtggagggcctcgccatgtcctgctgcccgacttccttgtgaaacctcctagtagaaaaagttcttgggacaaacttcatttgacttcaccataagggaaagaagagagccttgttggacactgaagaagggacggggatttctcctcctaatctgggcctcttgtcatggatgaagagactcggcacagccttgagtgcatccaggccaatcagatctttcccaggaagcagctgatccgggaggatgagaatcttcaggttcctttccttgaacttcatggagagagcacagagtttgtgggccgtgccgaggatgccatcattgccctttccaattacagacttcacatcaagttcaaggagtctcttgttaatgttccattacagcttatagaaagtgttgaatgccgagatatatttcagcttcatttgacttgcaaagactgcaaagttatcaggtgtcagttttcaacctttgagcagtgtcaagagtggctgaagagactgaacaacgcaatccgaccacctgctaaaatagaagatctcttctcatttgcataccatgcttggtgcatggaggtctatgccagtgaaaaagagcaacatggagacctgtgcagaccaggggagcatgtaacttcaaggtttaaaaacgaggtggagaggatgggttttgatatgaacaacgcctggaggatttccaacatcaatgagaagtacaaattatgtggtagctatcctcaagagctcatagtgcctgcctggatcactgacaaagaactggaaagtgtatcaagtttcaggtcctggaagcgcatccctgccgtcatctacaggcaccagagcaatggagctgtcattgcccgctgtggacagccagaggttagctggtggggctggcgaaatgcagatgatgagcatctggtacagtcagtagccaaagcttgtgcctctgactcccgatcgagtggcagcaagctgtcaactaggaacacttctcgagactttcccaatgggggagacctttctgacgtggagttcgattcttctctgtcaaatgcttcaggagcagagagtttagccatccaaccgcagaagcttttgatcttggatgcacgctcctatgcagctgctgtggcaaaccgagccaaaggaggaggctgcgaatgcccagagtattacccaaactgtgaagttgtgtttatggggatggcaaacattcattctattcggaggagttttcagtctctgcggttgctgtgcactcagatgccagatccgggaaattggctatcagctcttgaaagcacaaaatggctccatcacttgtctgtgcttctgaaatcagcgcttctggtagtgcatgctgtggatcaggatcagcggccggtgctagtacactgctcagatggctgggaccgcaccccccagattgtggcattggctaagctcttgctggacccttattaccgaaccatagagggtttccaggtcctcgtggaaatggagtggctggattttggccataaatttgctgaccggtgtggtcatggggagaactcggatgatctgaatgaacgttgcccagtgtttctgcagtggcttgactgtgttcatcagcttcagaggcaatttccttgctcttttgagttcaatgaagcattccttgtgaaactggtgcagcatacctattcctgcctgtttggaacattcctgtgcaacaacgccaaggagagaggggaaaagcatactcaggaacggacatgttccgtgtggtcacttcttcgggcaggcaacaaggctttcaaaaacctactgtattcctctcagtcagaagccgtgctgtaccctgtgtgccatgtgcgtaacctgatgctgtggagtgcagtgtacctgccctgcccatccccaaccacccctgtggacgacagctgtgcaccatacccagccccaggcaccagccctgatgatccccccctgagccggctaccaaagactagatcatacgacaatctgaccacagcctgtgacaacacagtgcctctggccagccggcgctgcagcgaccccagcctgaacgagaagtggcaggagcaccggcgctcactagagctgagcagcctggctggccctggagaggatcccctttctgccgacagcctagggaagcccaccagagtgccggggggtgccgagctttctgttgcagccggagtagctgaggggcagatggagaacatcttgcaggaggccaccaaagaggagagtggagtagaggaacctgcccacagggcaggcattgagatacaggagggtaaagaggaccctctcttagaaaaggagagcaggaggaagacacctgaggcctcagccattggacttcaccaagacccagaactgggtgatgctgctctgaggagccatctggatatgagctggcctctgttctcacagggcatttctgaacagcagagtgggctcagtgttctcctcagttctctccaggtcccccccaggggagaggattccctggaggtccctgtggagcagtttcgaatagaagagattgcagagggtagggaggaagcagttcttccaatcccagtagatgcaaaagttggctatggtacctcacagtcatgttctctgctaccttcccaagtcccttttgagaccagaggaccaaacgtggacagttctacagacatgttagtggaagataaggtgaagtcagtaagtgggccccaaggtcatcatagatcttgccttgtaaatagtggcaaggacaggcttcctcagaccatggaacccagcccttcagagacaagcctggtcgagaggccccaagtggggtctgtggtgcataggacttcccttggcagcactctcagcctgacacgttccccttgtgccttgcctttagccgaatgtaaagaggggcttgtgtgcaatggtgccccagagactgaaaacagggcctcagagcagcccccaggtcttagcaccctccagatgtaccccacacccaatgggcattgcgccaatggggaggctggtaggagcaaggactcactgagccgtcagctgtctgctatgagctgcagctctgcccacttacactcaaggaacttgcaccacaagtggctgcatagccactcaggaaggccatctgcaaccagcagccccgaccagccttcccgcagccacctggacgatgatggcatgtcagtgtacacagacacgatccaacagcgcctgcgtcagattgagtcaggccaccagcaggaagtagaaactttgaagaaacaagtccaggagctgaagagtcgcctggagagccagtacctgaccagctccctacactttaatggagactttggggatgaggtgacttcaatccccgactcggaaagcaatctggatcagaactgtttgtctcgctgcagcacagagattttctctgaagccagctgggagcaggtggataaacaggacacagagatgacccgttggcttcctgaccacctggccgcccactgctatgcgtgcgacagtgccttctggcttgccagcaggaagcaccactgcaggaattgtgggaacgtattctgctccagttgttgtaaccagaaggttccagttcccagccagcagctctttgaacccagtcgagtatgcaagtcttgctatagcagcctacatcccacaagctccagcattgaccttgaactggataagcccattgctgccacttccaactgaagctcagtgacctgggtgggcagtggccaagctgctgttcctatgacaggcccactcaacctgggcagaccgagaggcccgtgcactttggaatgggagcgtggaaccacctgtacagagtgacagatttgggatgcaccactggattgtagattgatttttctttcctgtccccctactccctccctaccttttccatcctcctcctctgccttcaaaaaaggaaactttcccttggttgtcttaattttttttttttttgatggaagaccaagggttgccaggcccactgtaactgccgagctgcctgctgtcacgtgacactgagggatggcttgtttcttccgggtgggaggatggtggtcagagccaggagtatggagatctgagaccgtgagcagggaagaaagccagtgctaacatgcaaccattcctcacgccaccgccacatcagagctggttgggaaccctttgctgctggggaggctggaagcatattccccaagagcactgccctgggcatcatctccctcctgcgaggagctgagccagtcccctcacagatggataaatgaggctgatgtttggagggagaggcacacggtaaatggcatccccttaggcgcctctttgggaaaggaaagtggatgctcctttgaggcaggcgaggggctgggagtgggtagccgtcatgttgtcccccgtgggatcccatttttaacttgacccagattgtcttgggctccttttactttcagggggctgctttcctgggccaggctgtgtagcacttcccaccctcaggcatgagtacagactggtcaaaatgtttatgcagtcaaggccaaagcctgccctgagcccagacacacctgggtccccattctggggcctggtcccctaaacaatctcttcctcagccagcacagggaaatccagactcagggttccagaaatcccccgttcccaaaccaaaccaatcatggatcttccctttaaggggtagaatcagcctttagagttacaagcccctggaaaagggagcaggtcccatacaatcagcctttctcctcttctcttcttgggacaggaataactgctgagcagtccccctttgccactcctggctgtctgagtgggcacttgtctggctgctggccagcagtgaagggccacttggtgacttcgtagggttccttagagaagtgacatggccttgaggagattcagggcacctttcctcagtgagctttgatatggtccaaaaacagccttaaatcaagaatatttgtggaggtaggtgtggggaaggttggagaagagttaggtttgtgctttgtaatcttggcatccatgttttgtgcctgccctccctcttggggaggccatgcttgactctgctgaaagctgctaactggtgacagggtggatcatggtgaggactaggggtaaggtcagggaatgcttaagctctggccctgccctgtattcctcttccccttggtagcagttccctgaccaagggcaaggtgtgtctcaggaaggtggttctgtgcatgcctgggtgtggttaaggcgtggcccagaaggcttccctggtgctctcagtccaggcaaagcccagagcatctgagcacgtctctgacttccagtggcaacacagtttgaacgtggtgaaacagggtgtagttcttttccacattctgtgtcatctagtcgtgcaggtagggaaaaagttggtctaattgaagattgtgcatttcctagtgacaggtgccaagaggttatgatacgggtttcttgggtctgatgtacagtgtgaataaatgcttgcagctcttagctcttttttgatcgatgaagcacttttttattaatattttcctttgttaaaggaggaaccgtaactctccatagctgtacatataacccttttctcctaaagaggagtcagtcagtgctcctatatttttcattttttgtcaaagcaagaagtaaatactttagaattgttaaatatataaataaagcaaataaagttgagtgttccacatggtagcatttgctaacacttcctaa

SEQ ID NO: 57 - DNA, 6246 bp, Homo sapiens
cgcccggtggcagctgtggggtctagggctcagacgggggccattttgccagaggctgcctcccggagttgggggcggcctggcggcaggctgaagctgttcttttgcctcttctgcagcttggggcttggagaggatctggaagtctgggctccatcgagccctttggagacggcaatggtttcttccaaccaccaccacctgacaaccctgcatggcggctgccccctccgcgctgcttctgctgccgccctttccagtcctctctacctatcggctccagagccgcagtcgtccttccgccccagagaccgatgatagtcgagttgggggcattatgagaggagagaaaaactactacttccgtggagctgcgggggaccacggttcctgccccactacaacttcgcctctggcctcggccctcttgatgccctcggaggcagtctcaagcagctggtctgagtctggaggcggtttgtcagggggagatgaagaggacactcggctccttcaactcctccgcactgcccgggatccttctgaggccttccaggctttgcaagctgctttgccgcggcggggcggtcgacttggcttcccccgacgcaaggaagctttgtatcgggcactgggccgagtgcttgtggaaggaggtagtgatgagaagcggctctgcttgcaacttctctcggacgttctccggggtcagggggaggcaggccagcttgaagaggcctttagcttagcacttttgcctcaactagttgtctcgttacgggaagagaatccagccctgcggaaagatgcgctgcagatccttcatatatgtctgaaacgtagtcctggagaggtgctgagaacgcttatacaacaaggactggaaagtaccgatgcccgacttagagcttccacagcactactgcttcccatcttgcttactactgaggacttgttgcttggtctggatctcaccgaggtgataatatccctagcccgaaagcttggtgatcaggagacagaagaagaatctgagacagctttctccgcacttcaacaaattggggagcgacttggccaagacaggtttcaatcttacatttctcgtctgccctctgccctgaggagacactacaatcgccgcctggagtcccagtttggaagtcaggttccttattatttggaacttgaagcctctggatttcctgaagatccccttccctgtgcagtgactctttccaacagcaatcttaaatttgggattattcctcaggagctgcattcacgattattggatcaggaagactataagaaccggacccaggccgtcgaagaactaaagcaggtgctgggaaaatttaaccctagttctactcctcattctagtcttgttggcttcattagtttgctatataatttgttagacgattctaacttcaaagtggtgcatggcacacttgaagtcctgcatttactggttattcgccttggagagcaggtacagcagttcttgggaccagttatagcagcttctgtcaaagtgctggcggacaacaagttggtgatcaaacaagaatacatgaaaatcttcctcaagctaatgaaggaagtaggacctcagcaggtgctttgtttactcctgaaacatctcaaacataagcattccagagtgagagaggaggtggtgaacatttgcatctgctccctgctgacctatcctagtgaggattttgacttgcccaaactgtcctttgatcttgccccagctcttgtagatagcaaacgcagggtacgccaagcagctttagaagcttttgccgtattggcatcatcaatgggctcaggtaaaaccagcatcctttttaaagctgtggatacagttgaactgcaagataatggagatggagtgatgaatgctgtgcaggccagattggctaggaaaaccttaccaaggctcacagagcagggatttgtggaatatgcagtactgatgccatcttctgccgggggtaggtcaaaccatttggcacatggagcagatacggactggcttttggctggtaacagaactcagagtgcacactgtcactgtggtgaccacgtgagggatagcatgcacatttatggatcttacagcccaactatctgtacccgaagggtattaagtgcaggaaaaggaaaaaataaattaccatgggaaaatgagcaacctggaatcatgggagaaaaccagacctccacttccaaggatatagagcagttttcaacatatgatttcatcccatctgcaaaattaaagctttctcaaggaatgccagtcaatgatgatttatgttttagcagaaaaagagtatcaagaaacttatttcagaatagtcgggattttaacccagattgtcttcctttatgtgctgctggtactactgggactcatcaaacaaatctttctgggaaatgtgcacaacttggattttcacaaatatgtggtaaaactggcagtgtgggttctgacttacaattcctagggacaactagcagtcatcaagaaaaagtgtatgctagcctcaattttggcagtaagacacagcaaacatttggtagtcaaacagagtgtacttcctcaaatggtcaaaatccaagtccaggagcttacatccttccatcctatcctgtctcatcacctcgaactagtccaaagcatacatctcctcttattatatctccaaagaagtctcaagataattctgttaatttctcaaattcctggcctcttaaaagcttcgaaggactatcaaagccaagtccacagaagaagcttgtcagccaaaaatcgtctgatcctacgggtagaaatcatggagaaaattctcaagaaaaacctccagttcagcttacacctgccttggtgagatcgccatcttcccgacgaggtctaaatgggacaaagcctgttcctcccataccaaggggaataagccttttgcctgataaagctgatttaagcacagtgggacacaaaaagaaagagcctgatgatatttggaagtgtgaaaaagatagtcttccaattgatctttcagaattaaatttcaaggataaagatttggatcaagaagagatgcatagctctcttaggtcccttcgtaatagtgcagctaagaaaagagcaaaactgagtggcagtactttagatcttgaaagccctgattctgcaatgaagctcgacttgacgatggactccccgtctctgtcttcctcaccaaacatcaattcttacagtgaaagtggagtttacagccaagaatcattgacttcttctctgtctacaactccccaggggaagagaataatgtcagacatatttccaacatttgggtcaaaaccttgtccaacaagactttcttctgcaaagaaaaaaatttctcatattgctgaacaaagccccagtgcagggtcatcatcaaatccacagcaaatttccagttttgacttcacaaccacaaaggctttatcagaagactcagtagtagttgttggaaaaggcgtatttggaagtttaagttcagcaccagcaacctgcagccaatcagtgatatcttctgtggaaaatggggatacattttcaattaaacaaagtattgaaccaccatcagggatttatggaagatcagtccagcaaaatatttcatcatatcttgatgttgagaatgaaaaagatgctaaagtttctatttctaaatctacttataacaagatgagacaaaagagaaaagaagagaaagaactgtttcacaataaagattgtgaaaagaaggaaaaaaattcctgggaacgaatgagacatacaggaactgagaaaatggcatctgaaagtgaaacacctactggagctatttcacagtataaagaaaggatgccttctgtcactcatagtccagaaataatggatctgtcagaactacgaccattctctaaaccagaaatagcactgacagaagccctgaggcttttggctgatgaggattgggagaagaaaattgagggactgaattttattagatgcttagctgcttttcattctgagatactgaacacaaagttgcatgaaacaaattttgcagttgttcaagaggtgaaaaatttacgttctggagtttctcgtgctgctgtggtctgtttaagtgatcttttcacttatttgaaaaagagcatggatcaagagctagataccacagtaaaagttttgttgcacaaggctggtgaatcaaatacatttataagagaagatgttgacaaagcattgagagctatggttaataatgtaactcctgcacgtgcagttgtttctcttatcaatggtggacaaaggtattatggtcgaaagatgctgttcttcatgatgtgtcatcctaactttgaaaaaatgcttgaaaagtatgtcccatctaaagatttgccatatattaaggactctgttagaaacttacagcaaaagggtttgggggagataccattagatactccttcagcaaaaggaagacgatctcatactggcagtgttggaaatacaagatcatcatctgtttctagagatgctttcaattcagctgaaagagctgtaactgaagttcgtgaagtcaccagaaaatcagtccctcgtaattccttagaaagtgctgagtaccttaaactcataactggcttattaaatgcaaaagactttcgtgatcgtattaatgggattaagcagcttttatcagatacagaaaataatcaagaccttgttgttggaaacattgtgaagatttttgatgcttttaaatctcgacttcatgattctaatagtaaagtaaatctggtggctctggaaacaatgcacaaaatgattcctctacttagagaccacttatctcctataatcaacatgctaattccagcaatagtggataacaatctgaattccaagaatccaggcatctatgcggctgctacaaatgttgttcaggcactgagtcagcatgtagacaattacttacttctacagccattttgcacaaaagctcagtttttaaatggaaaagcaaaacaggacatgacggaaaagcttgctgatattgttacggaactttatcaaaggaagccgcatgccacagagcagaaagtgttggttgttttatggcatctcttaggaaatatgacaaatagtggctctctgcctggagctggaggaaatatacgaacagccacagctaaattatcaaaagcactctttgcacagatgggtcagaatctgttaaatcaggctgcatctcaaccaccacatatcaaaaagagtttggaggaattactcgatatgacaattttaaatgaattatgaatcttcgataaaatactgtatgatgaacaaaagtgtttacatgatgacaaatggaactttctaaaagttatgttatcagtgcctgcacttcacatccagcaaattaagtcaatggctatttttatttgcagcctatgagtacacatctgtcctatatcaaccttaccacttatattcatcacataaaaacctaaaatattcatgaataattcatgaaatctgagtcacatgggatgaattcaattttaatatttttgagaaaagtcctgctcatttgcactattctatagaaactacaatttgttgccctatatgtaaaattagaattgtaattaaaaatacacattttattatgtaatcatgttctggtatgtctcatttctcagccttattttataacgtggaagtcattgaactatgttatcagaaactaagtttgtatattatttgtgaaaaacatgtatttctgaatcagtccgctaatatgattgtgcagtattagcttgcttttgctgctgtgttaatgtcatatatttgcttaccttttgggttcaattatctacataattgtgaaatttaacaagttataataaagcatgacaaccaaagttttagaaaacattaaacattttaaatgcacgtttaaaaaacgtgttgaatgtaacccccctatttttgtgtgcaaacactaaattttattgctttatgttttgacctttataaaggtgttattctgctgcccagttttgtaattctcaaaaatagtgccaggtcttctatagcttttttcagaattcatgggcttacaagtactgtatgcatctttaaaaagaaaaggaatgttataaaataaaaggatttatttcttt

SEQ ID NO: 58 - DNA, 4227 bp, Homo sapiens
cgcacgcgcgcgcgcggcggccccaggtacgcggacaagatggcggcggcagcagtcgacagcgcgatggaggtggtgccggcgctggcggaggaggccgcgccggaggtagcgggcctcagctgcctcgtcaacctgccgggtgaggtgctggagtacatcctgtgctgcggctcgctgacggccgccgacatcggccgtgtctccagcacctgccggcggctgcgcgagctgtgccagagcagcgggaaggtgtggaaggagcagttccgggtgaggtggccttcccttatgaaacactacagccccaccgactacgtcaattggttggaagagtataaagttcggcaaaaagctgggttagaagcgcggaagattgtagcctcgttctcaaagaggttcttttcagagcacgttccttgtaatggcttcagtgacattgagaaccttgaaggaccagagattttttttgaggatgaactggtgtgtatcctaaatatggaaggaagaaaagctttgacctggaaatactacgcaaaaaaaattctttactacctgcggcaacagaagatcttaaataatcttaaggcctttcttcagcagccagatgactatgagtcgtatcttgaaggtgctgtatatattgaccagtactgcaatcctctctccgacatcagcctcaaagacatccaggcccaaattgacagcatcgtggagcttgtttgcaaaacccttcggggcataaacagtcgccaccccagcttggccttcaaggcaggtgaatcatccatgataatggaaatagaactccagagccaggtgctggatgccatgaactatgtcctttacgaccaactgaagttcaaggggaatcgaatggattactataatgccctcaacttatatatgcatcaggttttgattcgcagaacaggaatcccaatcagcatgtctctgctctatttgacaattgctcggcagttgggagtcccactggagcctgtcaacttcccaagtcacttcttattaaggtggtgccaaggcgcagaaggggcgaccctggacatctttgactacatctacatagatgcttttgggaaaggcaagcagctgacagtgaaagaatgcgagtacttgatcggccagcacgtgactgcagcactgtatggggtggtcaatgtcaagaaggtgttacagagaatggtgggaaacctgttaagcctggggaagcgggaaggcatcgaccagtcataccagctcctgagagactcgctggatctctatctggcaatgtacccggaccaggtgcagcttctcctcctccaagccaggctttacttccacctgggaatctggccagagaaggtgcttgacatcctccagcacatccaaaccctagacccggggcagcacggggcggtgggctacctggtgcagcacactctagagcacattgagcgcaaaaaggaggaggtgggcgtagaggtgaagctgcgctccgatgagaagcacagagatgtctgctactccatcgggctcattatgaagcataagaggtatggctataactgtgtgatctacggctgggaccccacctgcatgatgggacacgagtggatccggaacatgaacgtccacagcctgccgcacggccaccaccagcctttctataacgtgctggtggaggacggctcctgtcgatacgcagcccaagaaaacttggaatataacgtggagcctcaagaaatctcacaccctgacgtgggacgctatttctcagagtttactggcactcactacatcccaaacgcagagctggagatccggtatccagaagatctggagtttgtctatgaaacggtgcagaatatttacagtgcaaagaaagagaacatagatgagtaaagtctagagaggacattgcacctttgctgctgctgctatcttccaagagaacgggactccggaagaagacgtctccacggagccctcgggacctgctgcaccaggaaagccactccaccagtagtgctggttgcctcctactaagtttaaataccgtgtgctcttccccagctgcaaagacaatgttgctctccgcctacactagtgaattaatctgaaaggcactgtgtcagtggcatggcttgtatgcttgtcctgtggtgacagtttgtgacattctgtcttcatgaggtctcacagtcgacgctcctgtaatcattctttgtattcactccattcccctgtctgtctgcatttgtctcagaacatttccttggctggacagatggggttatgcatttgcaataatttccttctgatttctctgtggaacgtgttcggtcccgagtgaggactgtgtgtctttttaccctgaagttagttgcatattcagaggtaaagttgtgtgctatcttggcagcatcttagagatggagacattaacaagctaatggtaattagaatcatttgaatttatttttttctaatatgtgaaacacagatttcaagtgttttatcttttttttttaaatttaaatgggaatataacacagttttcccttccatattcctctcttgagtttatgcacatctctataaatcattagttttctattttattacataaaattcttttagaaaatgcaaatagtgaactttgtgaatggatttttccatactcatctacaattcctccattttaaatgactacttttattttttaatttaaaaaatctacttcagtatcatgagtaggtcttacatcagtgatgggttctttttgtagtgagacatacaaatctgatgttaatgtttgctcttagaagtcatactccatggtcttcaaagaccaaaaaatgaggttttgcttttgtaatcaggaaaaaaaaaaattaatgaaccttaaaaaaaaaaaaaaaggttttgaagggaaaaaaagtggtttcacacctcttgttattccttagagtcacttcaaggcctgtttgaatgtggcaggttagaaagagagagaatgtctttcatttgaagagtgttggacttgtgtgaaaggagatgtgcgtgttggaatctgcttttccaagccgccagggtcctgacggcagcaggacgaagcctgttgtggcgtcttctgggaaagcctgaccgtgtgttcggacggcactggctcctttccgaagttctcagtaactgagcccagagtaactgcacgcctttgtgcagctctggagctccaccaactctcggcctgccagttctcaagcgagctaatcttgtcattaatcgatagaagctaacttccgaagttaggacctagttactttgctctcaacatttaaaataatgcagttgctctagtgaatggggcgttaggggcctgtctctgcacctgtctgtccatctgcatgcagtattctcacccatgttgaatgcctgctgcttgtttaccctttggaaaccctggggtgaccaaggtttggaaagccacctgagaccacttcatagcaagggaaggctttaagcagttactagaaagagatggggatttggcccctggctcctccagcctgaatgagctatttaatccactgtccatgttcctcatcagtcaaatccaaagtcaaaggatttgaacctgcatctggaaacgtaaccactcacagcacctggcccgccaaggttgggaggattgtacactactttcatttaaaggggaaagtttgataatacggaattaattaatatgaatgagatgcattaataagaacctgagcatgctgagagttgcaattgttggttttctggtttgattgatttccttttttcttagacacatcaaagtcaagaaagatggttttacctttactgacccagctgtacatatgtatctagactgtttttaaatgtctttcttcatgaatgcttcatggggctccaggaagcctgtatcacctgtgtaagttggtatttgggcactttatatttttctaaaaacgtgttttggatcctgtactctaataaatcataagtttctttttaaaaattttccaaaacttttctccattttaaaaagccctgttataaacgttgaactttcacaatgttaaaatgttaaatatttggatatagcaacttcttttctcttcaaatgaatgccaagatttttttgtacaatgattaataaatggaacttatccagagaaaccaaaaaaaaaaaaaaaa

SEQ ID NO: 59 - DNA, 8145 bp, Homo sapiens
atgtgtgctccaagcagaagtccagtacctgaaaaggcccctaaagtcctgtggactctcagcaatgagataaatttagattcccagttaagcaacgcaccatggacagtcattaaacggctccgatctccagtaaatggtggaaagaatgaatggattctgtactgtgcctctggggtatgcggggatctgattataactataggtgtagaggctgtgggggaggtagaaattggtatgagaagaaccgtcctttcttccaagcgaaacaagaaggttccagccatctctgctgcaaagggtcttgatgcctacaagacgagtgaggacatcctggaacactatggggatggcagggcaagctctcctatacagccagagcagcagaagctgttctttcccttgcttcttccttccacaacttctgtgagtgcatctaatcggcaggctctaactcacatccaaaactctaaccatgaacatctacaagaagcttctcgtgtgaccaactcttacagccgccaggtgttcacaaacccgcaaggcagagtgggcttgtcctcctttacagagggcgactgcaatgtggcagatccttggggttgtggaggtaaaccccggagcctggaagagcaggtaggatttctacacctagagctagaaggaagcgtgttccagccttttgctagccccacggggacctctgtgcacggatggacccgcccggacctggcgggaagcggcctggcaggcggcggccccggcggcatcagcagagacaggacggggccgacgccgcgggcccctgaggcgtgcgtgcccaccgggcccggcggcggcaccatgatgccgggcgagacccattcggcggcgcccgggacggcggcggacctgtcgcgatgtcagggctgcgcctctctgcagcagagttctttaaagttgtatcaggatactcatcaggaatatgctcgtgtaaaggaagaatgcttgaagagtgatgctcagaagaagaaactagaagctaaggtgaagaagctgcaaggaaaagtgaaactgcttctgaaggaactctggctctgtgtaaacacaacacacagactacctggtgaaggcagcaggtgtgtcccagaaaaacctgccaaagcaatcaccagctccagagtgcctggggaagatggtacgctacctccaacacagggcagccctctcaggacctcaaatgtgcagacatgcctcacaaaactgtccatggagataaaggaggactttttatgtcaaaatgtggaaaaacagagctccagtggaacaaattgtagttctgaccatgtttttaatgagaatggaaatcttgaggttttagtacaaagtcatcgtgacggtggtagtactgaatttgttgatcatgatcatttttttgatgaagatcttcaagctgcaattgacttcttcaaacttccccctcctcttctgtcaccagtgccctcgccccctccgatgtcatcacctcacccgggttccttaccgtcttcatttgcacctgaaacctactttggagaatacacagattccagcgataatgactcagtccagcttagaaattctgctgagtgtgtttcagaagatgatacaactgaatcacagaattattttggctcattgagaaaaaataaaggaagtggcacatgggaggaaaagcccaaatcacatgaagctatccaagctctgaatacatgggaagtaaataaagtgacaacttctggactcgagactttcacagcaacactgagagaatcttctgccacacactccttagttggtgaaaaacactggaccacagcatctcgatccatgagtgatagaaaaagagacattttacatgagacaaaaacacaaatggaggttagggagatggataagtcagtacaaactgagaagaccattcataaactcactcgaggtctatgcattgagagattgtctgccagccctgcacaagagaaggaagctgcccctgggaagtctgagttgtgttcttctccccttggcaaaaggccattaaatgaactcatggaatctgaaggaaaaaccgtattgtctaaaatgatgggatcgcccaaatcagagtttactaagtggacacgaattaatgaaatcacttctgaaccagaccgtatcacagtttctggccattttcacagactatctagagaattggaaaaggaaaaagaagatactcaagggttcactttaggagaatcacctgaatcagaagatgatgactcaggtgatggaatggatgtagcagggcttgacattgaaaccagtttttcttcctcttctaccttggtagcattgtctgttggcagtaatccccagtcttcttctgggttagactgtggtaatgatacagatattactactaaagtattctctactgaaccgcatcattcagaacataaattgcaaactaaaactttaaacacattacatctgcagtctgagccaccggagtgttctataggaggaaacaacttggagaatagcttgtgtgccttgagccctgaattgggagcatctaattttaatgatcagaagagcagtgggatagaatatacaaaagtagtaaaaggcttgaccaaaatacattcacttcctcggtcagtatttatgaaagctacaaaagatgggcaatgtgaaagtcaagatccaagaattgagctcacactaaataagccagatttcacatcattaataggttctcaggctgccttgatcaagagtggtttgggttttgttaaaagtacttcatggcaccatagtgatttattaaggaaaggtggcgaagaaagtctgagagccaaatcagaacatgaacagaagactagccatcagttacaaaaggcaatgccattcctacaaaatagaggaccaacacccaagcctgatcttcttagagaaaataacaatcctgtagaattcaagaccactgcatcggtgttgcctaatcaagtatcagttatcacaaaacagacaagacctgaaaaggttcagagtgccaaattggaacacttgaggccacatagggttgagcctaccttagtaacagaaaatagtggcaacaaaaccggtatgtcaactgtagcaaaatgtgatggggaaagagatgatacaacacaaaacatcacggaggtggctgctgtgaaaagcatttcaccagaagtttctgcctctaggagaaaattagattttaattctccaggtggttcttcaccagtagaaaattctgattgttccacaaatagcagattatctttctctcctgaaaatatcctcatccaaaaccaagacattgtgagagaagctgcagtgcagggagatgggcagaagcaaaggcagcctcaggccacagatctggactccagtgggacacatggcagtgagatgcttccagccacagaagtgactgtgtcaggagggttttctgttgaagaaaccagctgtggagacacagggagatctggtggtgaggccctggctgttgcaaatgattctaccagcacaccacaaaatgctaatggactttggaaattgaaatctacaactcccggtggtgctttgcctgagtgttttggcaccacagacactactttttcttcagcattttgcagaaaacatggagagacacaggatacctcccaaagtagcctgcctggtaccttacattgttacacaggcattcgagaggggggagacgacactgaggtagagagtgaggcatttagctgcagtgaggggagcgaacagcaagatgctcctgatgactcacagaaaaatttaggagacacagatgctgctgtagccgaggtgagaccttccttagaggtaggttatttgacgtcagctctgcaagattttaacataagtactttttctgagctggatagactttccacatcagaggttgtgatgtttcttgagagctgtcagttaggggattatagttcaggggactctgtttctgaatgttctagtaaaggaaccctaagtaaagaaatgaacaaagaattaaaggcaagtgaaataggagaaaaatacagaaagcaaccctgtgaggaagaaacacttggaacctgtgaagagtggattgaatcagaggaagatgattattcgttaaaaaatacaagtcagctcactcagtgttctttggaaactctgtctgaggttctgaccaagattaggcaagaacttcaaacaaattctgaagattgcaatggtaaagatactggcagtttattgctcttaaatgtaaataacaacatgaccactgagaatttaaaagagaaaagtccatttcgggaaacgactggctcctcatcacatgcttcagaaccaaccccacaagcagctgccttggacactgagggcagctctcccatcagcggtatgcctcagaatgaaaaccctcagagcagaccagaggcccgttcagatgcaggcaggcaaaccgatggtggggaagaagacctgccagaacctgtggagccatcagccttgtgctctgactctgtgatggagccatccatagagcaaagttctaactgcgaggccgaaacaacatttcagtgtcagatagcaacagtgacctcagaagttataaacgtacttataaataaggatcagaatctagtcattgaaaagggggacaactggacaatcatcagtggtgtagctgtcttgccacatgtggaccaggtcacactgtgtgacattcctggagacatccctatttctcaggatcaaggagagctggaagctggttgcatcccagtgacttctgctgagaagtccccagaggccagtcacactggccctgcatttcaggaggctccatgtggcaataatctttcatgtccccaagaggatgtttcaagcagtggtcagagcaccaactttgataagagtcgtttgcgaaatagacccgttaagcctagtatatggattagttctcaaatctatgatcaaaacttcgagactcagattgttgcgtctgatcacacatattataactcaaaactagagccatctggcaaaaataagaatcgatcaaagatttcaaacaaagatcagtcaaacaaaccagtaaaaacttcagcgtcgagcagagttgaaactcatcagagtgaagttgctcagtcattttcaggggaaaaagctaatacaaaaactcaaagaagccaaactcagaccattttagcaaatgctgatacatccactcctacagattgttctcctgacacactgagtaaaatacggcaagaggtggggcctcctttgccgcctctgcttgctcctctgatagctacacctccaaggacttcacagccactgtctccactgatatcgagttctagtccttcctcaccagcctctcctgttggccaggtttctcccttccgtgaaaccccagtgcctcctgccatgtctccatggccagaggaccccagacgtgcctctcctccagatccttctccatctccatctgcagcttcagccagtgagagggtagtgccgtctcctctgcagttctgtgcggccacgccgaagcacgcacttcctgtgcctggccgactcccaccctgtgcatctggccacgctgctgtgggagggcctcaggagaattctgtgaaaatccttgacaccatgtatccagagttatctgccagggcccggaccctcaacatcctcaaagggaatattcaactcacacgaggtccgcctgctgactgtaagaatttaccgggacctgccagtgctatgataggattcaaaacgatcacttcagcagcaactgcttttgtcaaaactgggagcagctctggtggtgactgtaaccaagacaagtcaagagatttggggactcagcaggattcaagcgggaaaagaacactgtcaacgtctacactgagaagtgctaaaagactgcgcctggacactgggtccccagaaccagaaaccaggggagtcactgcagaaggaatccacaaaaacctcccagggaacctccctccagctgaagttgcaacaacaaatgaggaaagaagttgttctagtccagccgtcagtgcagtttcacagttgcctttaagcccaaaagaaactgtggagtcccatgataaagccatagctaatgccctgaagaaaattgcagagttttcttttgatctgttacctgtcattcgtagtcatgtgtatgtgggaaatatctccaaaaagcccgtaatgagagatcaagagaaggaagttgtttatgaatttagcacaacaaaaaagcatttagcagagtgcttgcttcactctattctctcagaactaaaaattcagaagatatctatggaccacaattacattcacgccctctgcagggtgtatgtgggtatttgtcggcaactcggagacttggaaagagctcgtttgttttgctacagcctacttaaagaagattttccggagtctgaaaaattaactttgtttattgcaaacatgtggcatgatatatttctctctcaatcggtgattaataaagcaatgcagttagttgccaggcaacgtgctaaaggagaggttctgaactgcttgagagcttttcttaattgggaaaagaatgccccggtagatgttggcttcatggtttctaagctgcttttgaccatacagttatgtccaaaaacagaatttcaacctagtgaaaaatttggtgaagacctaagtgataacacttgggaatacatatttgccattgatctgctctgctgccatcagaaatggatctggacgcatgataacatcataagtaaggagctgtggcctgtgatggataaatggataaaatacagaaaaggacatgcaaacattgcgtatactcctgatattattatagcctcaatactgaggctgattggtcgtttaggccaattgggtttgaaagaaggatttccatctgctgtgaaaaatattagttcggttattggtatgtttatacagcatgctcacgatgaagatataccatggggtatacagttagcagccgtgtatgctctttgtgacttgagtcccagcaatccagcagaaatttccaagatcctggaagcttggcggagagaggcctccaaaagcgttccgtctgcgattgtcagctgcctagaggaagtcagtgccctgagcacagaggagcttggctgacctgggatgccactgaggcttgagaagtgccttgacacattttgaacacaaatagtttgatcagctttcagaatacaaagggaggtttcaaaacaaaaagacataaaatagataaaacagaccagaggctctccttattgtttggcaaggagacaggagaaacaagcagtcgcatagtcgtttttccctaaatctaatacgtttcacttaaggctgttgtgatctgtgacatatgggttatattattgtgtctttgtcaaacaacaaaaacttgaacttagccctttttttgctgcagaaagtgtccttttagtggcttcttaaaattgagtggcattttataatgaacttaccaatataaaaacatgatttggttcctgagctgttgttgttggacttgtgttccaatgagtgactaggaaaaaataaattggcaaaaacctagagttttctgctatctttgctggaaatgagttgcaaaagtttttctcaagatgtagtgcgtaattgatcagagcaaaacatgcagagcccttagcagaaacccactttaatgcattttcttcatatccctaaagttccttaaaaatatgtgacaatgcatcaggaagaggagaactgaagagtagaagttcccttgcagatttttttatcagtgacatgtaatgagcaattcacagatgagcgcaggcagagctctgtgtgccgtgtacatatggaccgtgctatgatgtgtctcacattggatgatattccactttgggaattttagtatttgtatatagaaaatgggtttaataactcaccatggttttgatttgtcttatattcgttatttcttaaaactcttgtatgtgtttttataataaaaaataaaagtaagccatggatattactgttctgatt

SEQ ID NO: 60 - DNA, 4734 bp, Homo sapiens
tccggaggcgagccgagcgcggtggtgaggccgcctcagcgaaaaaaatgtccgcctgaagagacccacaagttctattcggggggaccgacagcccgccccgggaggaaggggcggccaggcccgaaagccgcctccccctcccagacccgagagctcgtgcggggcaaagtgaaccgagccgctgggcggtgcaaggggaagcccaagcccgttctcccggccaaagtgaactttaatcggggtggttggatgcggagacggggcggcaggacctgctagaagtggccgaagatgaatccccagcaacaacgcatggccgctatagggaccgacaaggagctgagcgacctactggacttcagtgcgatgttttccccacctgttaatagtgggaaaactagaccaactacactgggaagcagtcaattcagtggatcaggtattgatgaaagaggaggtacaacatcttggggaacaagtggtcaaccaagtccttcctatgattcatctagaggttttacagacagccctcattacagtgatcacttgaatgacagtcgattaggagcccatgaaggcttgtccccaacacctttcatgaactcaaatctgatgggaaaaacatcagagagaggctcattttccctgtacagcagagatactggattaccaggctgtcaatctagtctcctgagacaagatctggggcttgggagcccagcacagctatcttcttcaggaaaacctgggacagcatactattcattctctgctacaagttccaggaggagaccactccatgactctgcagcgcttgatcccttgcaagcaaaaaaagtcagaaaggtgcctcctggtttgccttcttctgtatatgcaccatccccaaattcagatgatttcaaccgtgaatctcctagttatccatctcctaagccaccaaccagtatgttcgctagcactttctttatgcaagatgggacccacaattcttctgacctttggagttcatcaaatgggatgagccagcctggttttggtggaattctggggacctccacttcccacatgtctcaatccagtagttatggcaaccttcattcacatgaccgcttgagttatcctccacactcagtttcaccaacagacataaacacgagtcttccaccaatgtccagctttcatcgcggcagtaccagcagttcaccttacgttgctgcctcacacactcctcccatcaatggatcagacagcattctaggaaccagagggaatgctgctggaagctcacagacaggtgatgcacttggaaaggctttggcatctatttattctcctgaccataccagcagtagttttccgtcaaatccatcaacaccagttggatcaccttcacctctcacaggtaccagtcagtggccaagacctggagggcaagcaccttcatccccaagctatgaaaactcactccactccctgcagtctcgaatggaggatcgtttagacagactggatgatgcaatccatgtgctgcggaaccatgctgtgggaccttccaccagtttgcctgctggtcacagtgatatacatagtttattgggaccatcccataatgcaccaattggaagcctcaattcaaactatggaggatcaagccttgttgcaagcagtcgatcagcttcaatggttggaactcatcgggaagactctgtcagtctcaatggcaatcattcagtcctgtctagtacagtcactacttcaagcacagacctgaaccataaaacacaagaaaattatagaggtggcttgcaaagtcagtctggaactgttgttacaacagaaatcaagactgaaaacaaagaaaaggatgaaaaccttcatgaacctccttcatcagatgacatgaagtcagatgatgaatcctcccaaaaagatatcaaggtttcatctagaggcagaacaagcagtactaatgaagatgaggatttgaaccctgaacagaagatagaaagggagaaggagaggcggatggctaacaatgccagagaacgcttacgcgtgcgggatattaatgaagcattcaaagagcttggccgaatgtgtcagcttcacttgaagagtgaaaaaccccaaacaaaactccttattcttcatcaagccgtggcagtcatccttagtctagaacagcaagtcagagagaggaaccttaaccccaaagcagcctgccttaagagaagggaagaagaaaaagtttctgccgtatcggcagagccgccaaccacactgccaggaacccatcctgggcttagtgaaactaccaaccctatgggtcatatgtaaacatcagccagttccagagttatcagtaggctagatagaaggtgacctctcctcataaggacttggacaactcagattatctgaagacacaaacctgacaggagggagaagaaaaaacaaaacacttgaaccaagaaactcaaatgtaatcctacgatcaaagcaactggtcaacacttccatcagaagtgaagataggaagctcatcagatagaacatcagcccatgagatgtttgcaacaaatcttttgttgcaagcagtgtgtcgcttctgcacaatcagagactgtctcgatctctccactcaccgtggaagttgccttgtgcctaaactgaattgacaaatgcattgtaactacaaattttatttattgttatgaaactgtaaggtctacatataaagggaaaaagttaatgtggaaagctgatctacactcagctgatgccagcatacattaaagcggttcacgtgcagagaacaaagcagtgacaaccattggcccttagcattcccggcatacctattagtgtcttaaaaaggaagggaaaagtcttttgttgccctctcctatcctcttgccatatgaatagcgttttccatgaaataggaaaatattacttggtatagcatttctcttgctctcattttttgatttatttttattttctctttgtgggtgttatatttgatctctaaatctgaacagtttatggtcacagtccagcctcctccgtgcagccctgtgtgctttgcacatttaccttacagtggtaagcagagaccatctgtgaccatagcctagctagcattttaaaaggggaaattttgttctctaggttttcccccaaataaacattgctttatttctaataataaccaagacttttcaagcttctagatctcataggaaagcttgtaatagcaaaattgtaaattacaagggaagaatctactttttagaaatcgctttgttttccaagcagtaagtactacatacagtacttgtaaagtgttagctgtaagtaagcacaaaatacatttaaaatacaaagacgattttttcaggctgtgattatggtgaacataacaaaacccagtagtcaccaaggcaggtagtgtgataaatgaacacaccactctgaggctaattacctaatggaatacaagagcaatggtcacccgtatttccttatcctagcctttatttctctgtcatttggatggctggtcaatggggaagaattgagtgggtgatttaatcaactgcaaaccatctgcccctgtcccaaaatgatgagccagattagcattaaaccagtacttgtcagtccatcttaatactgttcattaaggcactctctgtctctaatccttaggagttgttttaaaagacataatcactttgaacttccatgaaacctgtcttccaccacaacaaccctgggagagaaaaacatgctaaaggaggtatcttggcttaataattccttatagccaatatcaacagtggcaatcagcacacagaggaaaggacccaaatcactatgtagcttaaagatttctgttaatttgaaagaacaaaaacaagacagaacttctggtactctaatcaggatgattcctaacaagtcagtcatttgtgaacttagtggactttttggttactttaatttgcatatattctccagttacatcggactctatctgtggccttgttcttcatttcagtgttaatcagctaaacagaagttgttgcttatgatgtgtgagtgaacatatgccactgcctggcctttttttcttcagagcttgttgtctttttcgctatattagactttgcagtatgcccagaagctttccttcataaaatagaaagaaaaaaacatttggcttatttttcactgtagctagtcttttatacaataatcttgtaagaaaatttcttgaattctaaatattactctttctagatttttgaaatcaaaaagttttcagtaaaaagtttcttactttattttattatattaggtagtaaaaaatgtagggttatttaccataacctgttcattaatatcagaaatttacaatagcattttaagaccatagtaggattctagcataccgtgtagtacctatggagtattgtaagagctaattgttggagatgaattgcttctcatcttgttctccagtttccattgttggtttattgcagatttgtatcctgtgtcaaattcaaggtattattgataaaccttttcaaccagcagcaagaagttcaaatttttttctgtcactgtaacagaaaacacaatatgtatataacatttatgtagcaataaatgtgccatcttttttttaacacagtaaaaaaaaaaaaaaaaaaaaaa

SEQ ID NO: 61 - DNA, 1429 bp, Homo sapiens
ataagctgggtcccgatgccgcgagcggaatctcggcgctcccggaagtggcctgaaggcggcgcgccagtcccgagcagtgctcgctcctgctcggggcgctgcggccccgggcgtcgccatgaccagtgagctggacatcttcgtggggaacacgacccttatcgacgaggacgtgtatcgcctctggctcgatggttactcggtgaccgacgcggtggccctgcgggtgcgctcgggaatcctggagcagactggcgccacggcagcggtgctgcagagcgacaccatggaccattaccgcaccttccacatgctcgagcggctgctgcatgcgccgcccaagctactgcaccagctcatcttccagattccgccctcccggcaggcactactcatcgagaggtactatgcctttgatgaggcctttgttcgggaggtgctgggcaagaagctgtccaaaggcaccaagaaagacctggatgacatcagcaccaaaacaggcatcaccctcaagagctgccggagacagtttgacaactttaaacgggtcttcaaggtggtagaggaaatgcggggctccctggtggacaatattcagcaacacttcctcctctctgaccggttggccagggactatgcagccatcgtcttctttgctaacaaccgctttgagacagggaagaaaaaactgcagtatctgagcttcggtgactttgccttctgcgctgagctcatgatccaaaactggacccttggagccgtcgactcacagatggatgacatggacatggacttagacaaggaatttctccaggacttgaaggagctcaaggtgctagtggctgacaaggaccttctggacctgcacaagagcctggtgtgcactgctctccggggaaagctgggcgtcttctctgagatggaagccaacttcaagaacctgtcccgggggctggtgaacgtggccgccaagctgacccacaataaagatgtcagagacctgtttgtggacctcgtggagaagtttgtggaaccctgccgctccgaccactggccactcagcgacgtgcggttcttcctgaatcagtattcagcgtctgtccactccctcgatggcttccgacaccaggccctctgggaccgctacatgggcaccctccgcggctgcctcctgcgcctgtatcatgactgaggtgcctcccaacgctccgcccacgctgacaataaagttgctctgagtttggagactggtcctcgctccggggagcaagtggggggcgtgcagatgtgcctgtgtctgtctctgagcacctggtgtccgtgtacaaggatggatgtgtacagtggctccttgggaactgagacatatctcagggaatggtgtctgtgctcagcccatccaccagaagagtctgctcacaagcca

SEQ ID NO: 62 - DNA, 2749 bp, Homo sapiens
gagggctggccagtgaggctcggcccggggaaagtgaaagtttgcctgggtcctctcggcgccagagccgctctccgcatcccaggacagcggtgcggccctcggccggggcgcccactccgcagcagccagcgagcgagcgagcgagcgagggcggccgacgcgcccggccgggacccagctgcccgtatgaccgcgccgggcgccgccgggcgctgccctcccacgacatggctgggctccctgctgttgttggtctgtctcctggcgagcaggagtatcaccgaggaggtgtcggagtactgtagccacatgattgggagtggacacctgcagtctctgcagcggctgattgacagtcagatggagacctcgtgccaaattacatttgagtttgtagaccaggaacagttgaaagatccagtgtgctaccttaagaaggcatttctcctggtacaagacataatggaggacaccatgcgcttcagagataacacccccaatgccatcgccattgtgcagctgcaggaactctctttgaggctgaagagctgcttcaccaaggattatgaagagcatgacaaggcctgcgtccgaactttctatgagacacctctccagttgctggagaaggtcaagaatgtctttaatgaaacaaagaatctccttgacaaggactggaatattttcagcaagaactgcaacaacagctttgctgaatgctccagccaagatgtggtgaccaagcctgattgcaactgcctgtaccccaaagccatccctagcagtgacccggcctctgtctcccctcatcagcccctcgccccctccatggcccctgtggctggcttgacctgggaggactctgagggaactgagggcagctccctcttgcctggtgagcagcccctgcacacagtggatccaggcagtgccaagcagcggccacccaggagcacctgccagagctttgagccgccagagaccccagttgtcaaggacagcaccatcggtggctcaccacagcctcgcccctctgtcggggccttcaaccccgggatggaggatattcttgactctgcaatgggcactaattgggtcccagaagaagcctctggagaggccagtgagattcccgtaccccaagggacagagctttccccctccaggccaggagggggcagcatgcagacagagcccgccagacccagcaacttcctctcagcatcttctccactccctgcatcagcaaagggccaacagccggcagatgtaactggtacagccttgcccagggtgggccccgtgaggcccactggccaggactggaatcacaccccccagaagacagaccatccatctgccctgctcagagaccccccggagccaggctctcccaggatctcatcactgcgcccccagggcctcagcaacccctccaccctctctgctcagccacagctttccagaagccactcctcgggcagcgtgctgccccttggggagctggagggcaggaggagcaccagggatcggaggagccccgcagagccagaaggaggaccagcaagtgaaggggcagccaggcccctgccccgttttaactccgttcctttgactgacacaggccatgagaggcagtccgagggatcctccagcccgcagctccaggagtctgtcttccacctgctggtgcccagtgtcatcctggtcttgctggccgtcggaggcctcttgttctacaggtggaggcggcggagccatcaagagcctcagagagcggattctcccttggagcaaccagagggcagccccctgactcaggatgacagacaggtggaactgccagtgtagagggaattctaagctggacgcacagaacagtctctccgtgggaggagacattatggggcgtccaccaccacccctccctggccatcctcctggaatgtggtctgccctccaccagagctcctgcctgccaggactggaccagagcagccaggctggggcccctctgtctcaacccgcagacccttgactgaatgagagaggccagaggatgctccccatgctgccactatttattgtgagccctggaggctcccatgtgcttgaggaaggctggtgagcccggctcaggaccctcttccctcaggggctgcaccctcctctcactcccttccatgccggaacccaggccagggacccaccggcctgtggtttgtgggaaagcagggtggacgctgaggagtgaaagaaccctgcacccagagggcctgcctggtgccaaggtatcccagcctggacaggcatggacctgtctccagagagaggagcctgaagttcgtggggcgggacagcgtcggcctgatttcccgtaaaggtgtgcagcctgagagacgggaagaggaggcctctggacctgctggtctgcactgacagcctgaagggtctacaccctcggctcacctaagtgccctgtgctggttgccaggcgcagaggggaggccagccctgccctcaggacctgcctgacctgccagtgatgccaagagggggatcaagcactggcctctgcccctcctccttccagcacctgccagagcttctccaggaggccaagcagaggctcccctcatgaaggaagccattgcactgtgaacactgtacctgcctgctgaacagcctgcccccgtccatccatgagccagcatccgtccgtcctccactctccagcctctcccca

SEQ ID NO: 63 - DNA, 3269 bp, Homo sapiens
cgcgccagggcgagggcaccgccgccggtcgggcgcgctgggcctgcccggaatcccgccgcctgcgccccgcgccccgcgccctgcgggccatgggagccggccgccggcagggacgacgcctgtgagacccgcgagcggcctcggggaccatggggagcgatcgggcccgcaagggcggagggggcccgaaggacttcggcgcgggactcaagtacaactcccggcacgagaaagtgaatggcttggaggaaggcgtggagttcctgccagtcaacaacgtcaagaaggtggaaaagcatggcccggggcgctgggtggtgctggcagccgtgctgatcggcctcctcttggtcttgctggggatcggcttcctggtgtggcatttgcagtaccgggacgtgcgtgtccagaaggtcttcaatggctacatgaggatcacaaatgagaattttgtggatgcctacgagaactccaactccactgagtttgtaagcctggccagcaaggtgaaggacgcgctgaagctgctgtacagcggagtcccattcctgggcccctaccacaaggagtcggctgtgacggccttcagcgagggcagcgtcatcgcctactactggtctgagttcagcatcccgcagcacctggtggaggaggccgagcgcgtcatggccgaggagcgcgtagtcatgctgcccccgcgggcgcgctccctgaagtcctttgtggtcacctcagtggtggctttccccacggactccaaaacagtacagaggacccaggacaacagctgcagctttggcctgcacgcccgcggtgtggagctgatgcgcttcaccacgcccggcttccctgacagcccctaccccgctcatgcccgctgccagtgggccctgcggggggacgccgactcagtgctgagcctcaccttccgcagctttgaccttgcgtcctgcgacgagcgcggcagcgacctggtgacggtgtacaacaccctgagccccatggagccccacgccctggtgcagttgtgtggcacctaccctccctcctacaacctgaccttccactcctcccagaacgtcctgctcatcacactgataaccaacactgagcggcggcatcccggctttgaggccaccttcttccagctgcctaggatgagcagctgtggaggccgcttacgtaaagcccaggggacattcaacagcccctactacccaggccactacccacccaacattgactgcacatggaacattgaggtgcccaacaaccagcatgtgaaggtgcgcttcaaattcttctacctgctggagcccggcgtgcctgcgggcacctgccccaaggactacgtggagatcaatggggagaaatactgcggagagaggtcccagttcgtcgtcaccagcaacagcaacaagatcacagttcgcttccactcagatcagtcctacaccgacaccggcttcttagctgaatacctctcctacgactccagtgacccatgcccggggcagttcacgtgccgcacggggcggtgtatccggaaggagctgcgctgtgatggctgggccgactgcaccgaccacagcgatgagctcaactgcagttgcgacgccggccaccagttcacgtgcaagaacaagttctgcaagcccctcttctgggtctgcgacagtgtgaacgactgcggagacaacagcgacgagcaggggtgcagttgtccggcccagaccttcaggtgttccaatgggaagtgcctctcgaaaagccagcagtgcaatgggaaggacgactgtggggacgggtccgacgaggcctcctgccccaaggtgaacgtcgtcacttgtaccaaacacacctaccgctgcctcaatgggctctgcttgagcaagggcaaccctgagtgtgacgggaaggaggactgtagcgacggctcagatgagaaggactgcgactgtgggctgcggtcattcacgagacaggctcgtgttgttgggggcacggatgcggatgagggcgagtggccctggcaggtaagcctgcatgctctgggccagggccacatctgcggtgcttccctcatctctcccaactggctggtctctgccgcacactgctacatcgatgacagaggattcaggtactcagaccccacgcagtggacggccttcctgggcttgcacgaccagagccagcgcagcgcccctggggtgcaggagcgcaggctcaagcgcatcatctcccaccccttcttcaatgacttcaccttcgactatgacatcgcgctgctggagctggagaaaccggcagagtacagctccatggtgcggcccatctgcctgccggacgcctcccatgtcttccctgccggcaaggccatctgggtcacgggctggggacacacccagtatggaggcactggcgcgctgatcctgcaaaagggtgagatccgcgtcatcaaccagaccacctgcgagaacctcctgccgcagcagatcacgccgcgcatgatgtgcgtgggcttcctcagcggcggcgtggactcctgccagggtgattccgggggacccctgtccagcgtggaggcggatgggcggatcttccaggccggtgtggtgagctggggagacggctgcgctcagaggaacaagccaggcgtgtacacaaggctccctctgtttcgggactggatcaaagagaacactggggtataggggccggggccacccaaatgtgtacacctgcggggccacccatcgtccaccccagtgtgcacgcctgcaggctggagactggaccgctgactgcaccagcgcccccagaacatacactgtgaactcaatctccagggctccaaatctgcctagaaaacctctcgcttcctcagcctccaaagtggagctgggaggtagaaggggaggacactggtggttctactgacccaactgggggcaaaggtttgaagacacagcctcccccgccagccccaagctgggccgaggcgcgtttgtgtatatctgcctcccctgtctgtaaggagcagcgggaacggagcttcggagcctcctcagtgaaggtggtggggctgccggatctgggctgtggggcccttgggccacgctcttgaggaagcccaggctcggaggaccctggaaaacagacgggtctgagactgaaattgttttaccagctcccagggtggacttcagtgtgtgtatttgtgtaaatgagtaaaacattttatttctttttaaaaaaaaaaa

SEQ ID NO: 64 - DNA, 4552 bp, Homo sapiens
agcgcccgccgcgtccggggccggctggtgcgcgagacgccgccgagagttgtgaagggcgcgggtggggggcgctgccggcctcgtgggtacgttcgtgccgcgtctgtcccagagctggggccgcaggagcggaggcaagaggggcactatggcagacaaagttaggaggcagaggccgaggaggcgagtctgttgggccttggtggctgtgctcttggcagacctgttggcactgagtgatacactggcagtgatgtctgtggacctgggcagtgagtccatgaaggtggccattgtcaaacctggagtgcccatggaaattgtcttgaataaggaatctcggaggaaaacaccggtgatcgtgaccctgaaagaaaatgaaagattctttggagacagtgcagcaagcatggcgattaagaatccaaaggctacgctacgttacttccagcacctcctggggaagcaggcagataacccccatgtagctctttaccaggcccgcttcccggagcacgagctgactttcgacccacagaggcagactgtgcactttcagatcagctcgcagctgcagttctcacctgaggaagtgttgggcatggttctcaattattctcgttctctagctgaagattttgcagagcagcccatcaaggatgcagtgatcaccgtgccagtcttcttcaaccaggccgagcgccgagctgtgctgcaggctgctcgtatggctggcctcaaagtgctgcagctcatcaatgacaacaccgccactgccctcagctatggtgtcttccgccggaaagatattaacaccactgcccagaatatcatgttctatgacatgggctcaggcagcaccgtatgcaccattgtgacctaccagatggtgaagactaaggaagctgggatgcagccacagctgcagatccggggagtaggatttgaccgtaccctggggggcctggagatggagctccggcttcgagaacgcctggctgggcttttcaatgagcagcgcaagggtcagagagcaaaggatgtgcgggagaacccgcgtgccatggccaagctgctgcgtgaggctaatcggctcaaaaccgtcctcagtgccaacgctgaccacatggcacagattgaaggcctgatggatgatgtggacttcaaggcaaaagtgactcgtgtggaatttgaggagttgtgtgcagacttgtttgagcgggtgcctgggcctgtacagcaggccctccagagtgccgaaatgagtctggatgagattgagcaggtgatcctggtgggtggggccactcgggtccccagagttcaggaggtgctgctgaaggccgtgggcaaggaggagctggggaagaacatcaatgcagatgaagcagccgccatgggggcagtgtaccaggcagctgcgctcagcaaagcctttaaagtgaagccatttgtcgtccgagatgcagtggtctaccccatcctggtggagttcacgagggaggtggaggaggagcctgggattcacagcctgaagcacaataaacgggtactcttctctcggatggggccctaccctcaacgcaaagtcatcacctttaaccgctacagccatgatttcaacttccacatcaactacggcgacctgggcttcctggggcctgaagatcttcgggtatttggctcccagaatctgaccacagtgaagctaaaaggggtgggtgacagcttcaagaagtatcctgactacgagtccaagggcatcaaggctcacttcaacctggatgagagtggcgtgctcagtctagacagggtggagtctgtatttgagacactggtagaggacagcgcagaagaggaatctactctcaccaaacttggcaacaccatttccagcctgtttggaggcggtaccacaccagatgccaaggagaatggtactgatactgtccaggaggaagaggagagccctgcagaggggagcaaggacgagcctggggagcaggtggagctcaaggaggaagctgaggccccagtggaggatggctctcagcccccaccccctgaacctaagggagatgcaacccctgagggagaaaaggccacagaaaaagaaaatggggacaagtctgaggcccagaaaccaagtgagaaggcagaggcagggcctgagggcgtcgctccagccccagagggagagaagaagcagaagcccgccaggaagcggcgaatggtagaggagatcggggtggagctggttgttctggacctgcctgacttgccagaggataagctggctcagtcggtgcagaaacttcaggacttgacactccgagacctggagaagcaggaacgggaaaaagctgccaacagcttggaagcgttcatatttgagacccaggacaagctgtaccagcccgagtaccaggaagtgtccacagaggagcagcgtgaggagatctctgggaagctcagcgccgcatccacctggctggaggatgagggtgttggagccaccacagtgatgttgaaggagaagctggctgagctgaggaagctgtgccaagggctgttttttcgggtagaggagcgcaagaagtggcccgaacggctgtctgccctcgataatctcctcaaccattccagcatgttcctcaagggggcccggctcatcccagagatggaccagatcttcactgaggtggagatgacaacgttagagaaagtcatcaatgagacctgggcctggaagaatgcaactctggccgagcaggctaagctgcccgccacagagaagcctgtgttgctctcaaaagacattgaagctaagatgatggccctggaccgagaggtgcagtatctgctcaataaggccaagtttaccaagccccggccccggcctaaggacaagaatgggacccgggcagagccacccctcaatgccagtgccagtgaccagggggagaaggtcatccctccagcaggccagactgaagatgcagagcccatttcagaacctgagaaagtagagactggatccgagccaggagacactgagcctttggagttaggaggtcctggagcagaacctgaacagaaagaacaatcgacaggacagaagcggcctttgaagaacgacgaactataacccccacctctgttttccccattcatctccacccccttcccccaccacttctatttatttaacatcgagggttgggggaggggttggtcctgccctcggctggagttcctttctcacccctgtgatttggaggtgtggagaaggggaagggagggacagctcactggttccttctgcagtacctctgtggttaaaaatggaaactgttctcctccccagccccactccctgttccctacccatataggccctaaatttgggaaaaatcactattaatttctgaatcctttgcctgtgggtaggaagagaatggctgccagtggctgatgggtcccggtgatgggaagggtatcaggttgctggggagtttccactcttctctggtgattgttccttccctcccttcctctcccaccatgcgatgagcatcctttcaggccagtgtctgcagagcctcagttaccaggtttggtttctgagtgcctatctgtgctctttcctccctctgcgggcttctcttgctctgagcctcccttccccattcccatgcagctcctttccccctgggtttccttggcttcctgcagcaaattgggcagttctctgccccttgcctaaaagcctgtacctctggattggcggaagtaaatctggaaggattctcactcgtatttcccacccctagtggccagaggagggaggggcacagtgaagaagggagcccaccacctctccgaagaggaaagccacgtagagtggttggcatggggtgccagcatcgtgcaagctctgtcataatctgcatcttcccagcagcctggtaccccaggttcctgtaactccctgcctcctcctctcttctgctgttctgctcctcccagacagagcctttccctcaccccctgaccccctgggctgaccaaaatgtgctttctactgtgagtccctatcccaagatcctggggaaaggagagaccatggtgtgaatgtagagatgccacctccctctctctgaggcaggcctgtggatgaaggaggagggtcagggctggccttcctctgtgcatcactctgctaggttgggggcccccgacccaccatacctacgcctagggagcccgtcctccagtattccgtctgtagcaggagctagggctgctgcctcagctccaagacaagaatgaacctggctgtgtcagtcattttgtcttttcctttttttttttttgccacattggcagagatgggacctaagggtcccacccctcaccccacccccacctcttctgtatgtttgaattctttcagtagctgttgatgctggttggacaggtttgagtcaaattgtactttgctccattgttaattgagaaactgtttcaataaaatattcttttctac

SEQ ID NO: 65 - DNA, 2586 bp, Homo sapiens
cgcccgcgcgcgggctcaactttgtagagcgaggggccaacttggcagagcgcgcggccagctttgcagagagcgccctccagggactatgcgtgcggggacacgggtcgctttgggctcttccacccctgcggagcgcactatcccgagccaggggcggtgcaagccccgcccggccctacccagggcggctcctccctccgcagcgccgagacttttagtttcgctttcgctaaaggggccccagacccttgctgcggagcgacggagagagactgtgccagtcccagccgccctaccgccgtgggaacgatggcagatgatcagggctgtattgaagagcagggggttgaggattcagcaaatgaagattcagtggatgctaagccagaccggtcctcgtttgtaccgtccctcttcagtaagaagaagaaaaatgtcaccatgcgatccatcaagaccacccgggaccgagtgcctacatatcagtacaacatgaattttgaaaagctgggcaaatgcatcataataaacaacaagaactttgataaagtgacaggtatgggcgttcgaaacggaacagacaaagatgccgaggcgctcttcaagtgcttccgaagcctgggttttgacgtgattgtctataatgactgctcttgtgccaagatgcaagatctgcttaaaaaagcttctgaagaggaccatacaaatgccgcctgcttcgcctgcatcctcttaagccatggagaagaaaatgtaatttatgggaaagatggtgtcacaccaataaaggatttgacagcccactttaggggggatagatgcaaaacccttttagagaaacccaaactcttcttcattcaggcttgccgagggaccgagcttgatgatggcatccaggccgactcggggcccatcaatgacacagatgctaatcctcgatacaagatcccagtggaagctgacttcctcttcgcctattccacggttccaggctattactcgtggaggagcccaggaagaggctcctggtttgtgcaagccctctgctccatcctggaggagcacggaaaagacctggaaatcatgcagatcctcaccagggtgaatgacagagttgccaggcactttgagtctcagtctgatgacccacacttccatgagaagaagcagatcccctgtgtggtctccatgctcaccaaggaactctacttcagtcaatagccatatcaggggtacattctagctgagaagcaatgggtcactcattaatgaatcacatttttttatgctcttgaaatattcagaaattctccaggattttaatttcaggaaaatgtattgattcaacagggaagaaactttctggtgctgtcttttgttctctgaattttcagagacttttttataatgttattcatttggtgactgtgtaactttctcttaagattaattttctctttgtatgtctgttaccttgttaatagacttaatacatgcaacagaagtgacttctggagaaagctcatggctgtgtccactgcaattggtggtaacagtggtagagtcatgtttgcacttggcaaaaagaatcccaatgtttgacaaaacacagccaaggggatatttactgctctttattgcagaatgtgggtattgagtgtgatttgaatgatttttcattggcttagggcagattttcatgcaaaagttctcatatgagttagaggagaaaaagcttaatgattctgatatgtatccatcaggatccagtctggaaaacagaaaccattctaggtgtttcaacagagggagtttaatacaggaaattgacttacatagatgataaaagagaagccaaacagcaagaagctgttaccacacccagggctatgaggataatgggaagaggtttggtttcctgtgtccagtagtgggatcatccagaggagctggaaccatggtgggggctgcctagtgggagttaggaccaccaatggattgtggaaaatggagccatgacaagaacaaagccactgactgagatggagtgagctgagacagataagagaataccttggtctcacctatcctgccctcacatcttccaccagcaccttactgcccaggcctatctggaagccacctcaccaaggaccttggaagagcaagggacagtgaggcaggagaagaacaagaaatggatgtaagcctggcccataatgtgaacataagtaatcactaatgctcaacaatttatccattcaatcatttattcattgggttgtcagatagtctatgtatgtgtaaaacaatctgttttggctttatgtgcaaaatctgttatagctttaaaatatatctggaactttttagattattccaagccttattttgagtaaatatttgttacttttagttctataagtgaggaagagtttatggcaaagatttttggcactttgttttcaagatggtgttatcttttgaattcttgataaatgactgtttttttctgcctaatagtaactggttaaaaaacaaatgttcatatttattgattaaaaatgtggttgcttaattcct

SEQ ID NO: 66 - DNA, 2956 bp, Homo sapiens
cgaggcgcggctccggggattcggctcgggccgctggctctgctctgcggggagggagcgggcccgcccgcggggcccgagccctccggatccgccccctccccggtcccgccccctcggagactcctctggctgctctgggggttcgccggggccggggacccgcggtccgggcgccatgcgggcatcgctgctgctgtcggtgctgcggcccgcagggcccgtggccgtgggcatctccctgggcttcaccctgagcctgctcagcgtcacctgggtggaggagccgtgcggcccaggcccgccccaacctggagactctgagctgccgccgcgcggcaacaccaacgcggcgcgccggcccaactcggtgcagcccggagcggagcgcgagaagcccggggccggcgaaggcgccggggagaattgggagccgcgcgtcttgccctaccaccctgcacagcccggccaggccgccaaaaaggccgtcaggacccgctacatcagcacggagctgggcatcaggcagaggctgctggtggcggtgctgacctctcagaccacgctgcccacgctgggcgtggccgtgaaccgcacgctggggcaccggctggagcgtgtggtgttcctgacgggcgcacggggccgccgggccccacctggcatggcagtggtgacgctgggcgaggagcgacccattggacacctgcacctggcgctgcgccacctgctggagcagcacggcgacgactttgactggttcttcctggtgcctgacaccacctacaccgaggcgcacggcctggcacgcctaactggccacctcagtctggcctccgccgcccacctgtacctgggccggccccaggacttcatcggcggagagcccacccccggccgctactgccacggaggctttggggtgctgctgtcgcgcatgctgctgcaacaactgcgcccccacctggaaggctgccgcaacgacatcgtcagtgcgcgccctgacgagtggctgggtcgctgcattctcgatgccaccggggtgggctgcactggtgaccacgagggggtgcactatagccatctggagctgagccctggggagccagtgcaggagggggaccctcatttccgaagtgccctgacagcccaccctgtgcgtgaccctgtgcacatgtaccagctgcacaaagctttcgcccgagctgaactggaacgcacgtaccaggagatccaggagttacagtgggagatccagaataccagccatctggccgttgatggggaccgggcagctgcttggcccgtgggtattccagcaccatcccgcccggcctcccgctttgaggtgctgcgctgggactacttcacggagcagcacgctttctcctgcgccgatggctcaccccgctgcccactgcgtggggctgaccgggctgatgtggccgatgttctggggacagctctagaggagctgaaccgccgctaccacccggccttgcggctccagaagcagcagctggtgaatggctaccgacgctttgatccggcccggggtatggaatacacgctggacttgcagctggaggcactgaccccccagggaggccgccggcccctcactcgccgagtgcagctgctccggccgctgagccgcgtggagatcttgcctgtgccctatgtcactgaggcctcacgtctcactgtgctgctgcctctagctgcggctgagcgtgacctggcccctggcttcttggaggcctttgccactgcagcactggagcctggtgatgctgcggcagccctgaccctgctgctactgtatgagccgcgccaggcccagcgcgtggcccatgcagatgtcttcgcacctgtcaaggcccacgtggcagagctggagcggcgtttccccggtgcccgggtgccatggctcagtgtgcagacagccgcaccctcaccactgcgcctcatggatctactctccaagaagcacccgctggacacactgttcctgctggccgggccagacacggtgctcacgcctgacttcctgaaccgctgccgcatgcatgccatctccggctggcaggccttctttcccatgcatttccaagccttccacccagctgtggccccaccacaagggcctgggcccccagagctgggccgtgacactggccgctttgatcgccaggcagccagcgaggcctgcttctacaactccgactacgtggcagcccgtgggcgcctggcggcagcctcagaacaagaagaggagctgctggagagcctggatgtgtacgagctgttcctccacttctccagtctgcatgtgctgcgggcggtggagccggcgctgctgcagcgctaccgggcccagacgtgcagcgcgaggctcagtgaggacctgtaccaccgctgcctccagagcgtgcttgagggcctcggctcccgaacccagctggccatgctactctttgaacaggagcagggcaacagcacctgaccccaccctgtccccgtgggccgtggcatggccacaccccaccccacttctcccccaaaaccagagccacctgccagcctcgctgggcagggctggccgtagccagaccccaagctggcccactggtcccctctctggctctgtgggtccctgggctctggacaagcactgggggacgtgcccccagagccacccacttctcatcccaaacccagtttccctgccccctgacgctgctgattcgggctgtggcctccacgtatttatgcagtacagtctgcctgacgccagccctgcctctgggccctgggggctgggctgtagaagagttgttggggaaggagggagctgaggagggggcatctcccaacttctcccttttggaccctgccgaagctccctgcctttaataaactggccaagtgtgaaaaaaaaaaaaaaaaaaaaaaa

SEQ ID NO: 67 - DNA, 913 bp, Homo sapiens
agagccggcgccgtcaccgcccgcattgccgctcccagtcccgcgctcggcacgacatgaaatcccccgacgaggtgctacgcgagggcgagttggagaagcgcagcgacagcctcttccagctatggaagaagaagcgcggggtgctcacctccgaccgcctgagcctgttccccgccagcccccgcgcgcgccccaaggagctgcgcttccactccatcctcaaggtggactgcgtggagcgcacgggcaagtacgtgtacttcaccatcgtcaccaccgaccacaaggagatcgacttccgctgcgcgggcgagagctgctggaacgcggccatcgcgctggcgctcatcgatttccagaaccgccgcgccctgcaggactttcgcagccgccaggaacgcaccgcacccgccgcacccgccgaggacgccgtggctgccgcggccgccgcaccctccgagccctcggagccctccaggccatccccgcagcccaaaccccgcacgccatgagcccgccgcgggccatacgctggacgagtcggaccgaggctaggacgtggccggcgctctccagccctgcagcagaagaacttcccgtgcgcgcggatcctcgctccgttgcacgggcgccttaagttattggactatctaatatctatgtatttatttcgctggttctttgtagtcacatattttatagtcttaatatcttgtttttgcatcactgtgcccattgcaaataaatcacttggccagtttgcttttctaccatccggctgtggctcagtgagactcctgctgggagggtggaggcccaggaatgggcgggcaggacaccctcatccagtcctgcggggctggtgtgaaaggcgctgggaaccggctttgaatgaataaatgaatcgtgt

SEQ ID NO: 68 - DNA, 5838 bp, Homo sapiens
ccgggcaggtggctcatgctcgggagcgtggttgagcggctggcgcggttgtcctggagcaggggcgcaggaattctgatgtgaaactaacagtctgtgagccctggaacctccgctcagagaagatgaaggatatcgacataggaaaagagtatatcatccccagtcctgggtatagaagtgtgagggagagaaccagcacttctgggacgcacagagaccgtgaagattccaagttcaggagaactcgaccgttggaatgccaagatgccttggaaacagcagcccgagccgagggcctctctcttgatgcctccatgcattctcagctcagaatcctggatgaggagcatcccaagggaaagtaccatcatggcttgagtgctctgaagcccatccggactacttccaaacaccagcacccagtggacaatgctgggcttttttcctgtatgactttttcgtggctttcttctctggcccgtgtggcccacaagaagggggagctctcaatggaagacgtgtggtctctgtccaagcacgagtcttctgacgtgaactgcagaagactagagagactgtggcaagaagagctgaatgaagttgggccagacgctgcttccctgcgaagggttgtgtggatcttctgccgcaccaggctcatcctgtccatcgtgtgcctgatgatcacgcagctggctggcttcagtggaccagccttcatggtgaaacacctcttggagtatacccaggcaacagagtctaacctgcagtacagcttgttgttagtgctgggcctcctcctgacggaaatcgtgcggtcttggtcgcttgcactgacttgggcattgaattaccgaaccggtgtccgcttgcggggggccatcctaaccatggcatttaagaagatccttaagttaaagaacattaaagagaaatccctgggtgagctcatcaacatttgctccaacgatgggcagagaatgtttgaggcagcagccgttggcagcctgctggctggaggacccgttgttgccatcttaggcatgatttataatgtaattattctgggaccaacaggcttcctgggatcagctgtttttatcctcttttacccagcaatgatgtttgcatcacggctcacagcatatttcaggagaaaatgcgtggccgccacggatgaacgtgtccagaagatgaatgaagttcttacttacattaaatttatcaaaatgtatgcctgggtcaaagcattttctcagagtgttcaaaaaatccgcgaggaggagcgtcggatattggaaaaagccgggtacttccagggtatcactgtgggtgtggctcccattgtggtggtgattgccagcgtggtgaccttctctgttcatatgaccctgggcttcgatctgacagcagcacaggctttcacagtggtgacagtcttcaattccatgacttttgctttgaaagtaacaccgttttcagtaaagtccctctcagaagcctcagtggctgttgacagatttaagagtttgtttctaatggaagaggttcacatgataaagaacaaaccagccagtcctcacatcaagatagagatgaaaaatgccaccttggcatgggactcctcccactccagtatccagaactcgcccaagctgacccccaaaatgaaaaaagacaagagggcttccaggggcaagaaagagaaggtgaggcagctgcagcgcactgagcatcaggcggtgctggcagagcagaaaggccacctcctcctggacagtgacgagcggcccagtcccgaagaggaagaaggcaagcacatccacctgggccacctgcgcttacagaggacactgcacagcatcgatctggagatccaagagggtaaactggttggaatctgcggcagtgtgggaagtggaaaaacctctctcatttcagccattttaggccagatgacgcttctagagggcagcattgcaatcagtggaaccttcgcttatgtggcccagcaggcctggatcctcaatgctactctgagagacaacatcctgtttgggaaggaatatgatgaagaaagatacaactctgtgctgaacagctgctgcctgaggcctgacctggccattcttcccagcagcgacctgacggagattggagagcgaggagccaacctgagcggtgggcagcgccagaggatcagccttgcccgggccttgtatagtgacaggagcatctacatcctggacgaccccctcagtgccttagatgcccatgtgggcaaccacatcttcaatagtgctatccggaaacatctcaagtccaagacagttctgtttgttacccaccagttacagtacctggttgactgtgatgaagtgatcttcatgaaagagggctgtattacggaaagaggcacccatgaggaactgatgaatttaaatggtgactatgctaccatttttaataacctgttgctgggagagacaccgccagttgagatcaattcaaaaaaggaaaccagtggttcacagaagaagtcacaagacaagggtcctaaaacaggatcagtaaagaaggaaaaagcagtaaagccagaggaagggcagcttgtgcagctggaagagaaagggcagggttcagtgccctggtcagtatatggtgtctacatccaggctgctgggggccccttggcattcctggttattatggcccttttcatgctgaatgtaggcagcaccgccttcagcacctggtggttgagttactggatcaagcaaggaagcgggaacaccactgtgactcgagggaacgagacctcggtgagtgacagcatgaaggacaatcctcatatgcagtactatgccagcatctacgccctctccatggcagtcatgctgatcctgaaagccattcgaggagttgtctttgtcaagggcacgctgcgagcttcctcccggctgcatgacgagcttttccgaaggatccttcgaagccctatgaagttttttgacacgacccccacagggaggattctcaacaggttttccaaagacatggatgaagttgacgtgcggctgccgttccaggccgagatgttcatccagaacgttatcctggtgttcttctgtgtgggaatgatcgcaggagtcttcccgtggttccttgtggcagtggggccccttgtcatcctcttttcagtcctgcacattgtctccagggtcctgattcgggagctgaagcgtctggacaatatcacgcagtcacctttcctctcccacatcacgtccagcatacagggccttgccaccatccacgcctacaataaagggcaggagtttctgcacagataccaggagctgctggatgacaaccaagctcctttttttttgtttacgtgtgcgatgcggtggctggctgtgcggctggacctcatcagcatcgccctcatcaccaccacggggctgatgatcgttcttatgcacgggcagattcccccagcctatgcgggtctcgccatctcttatgctgtccagttaacggggctgttccagtttacggtcagactggcatctgagacagaagctcgattcacctcggtggagaggatcaatcactacattaagactctgtccttggaagcacctgccagaattaagaacaaggctccctcccctgactggccccaggagggagaggtgacctttgagaacgcagagatgaggtaccgagaaaacctccctcttgtcctaaagaaagtatccttcacgatcaaacctaaagagaagattggcattgtggggcggacaggatcagggaagtcctcgctggggatggccctcttccgtctggtggagttatctggaggctgcatcaagattgatggagtgagaatcagtgatattggccttgccgacctccgaagcaaactctctatcattcctcaagagccggtgctgttcagtggcactgtcagatcaaatttggaccccttcaaccagtacactgaagaccagatttgggatgccctggagaggacacacatgaaagaatgtattgctcagctacctctgaaacttgaatctgaagtgatggagaatggggataacttctcagtgggggaacggcagctcttgtgcatagctagagccctgctccgccactgtaagattctgattttagatgaagccacagctgccatggacacagagacagacttattgattcaagagaccatccgagaagcatttgcagactgtaccatgctgaccattgcccatcgcctgcacacggttctaggctccgataggattatggtgctggcccagggacaggtggtggagtttgacaccccatcggtccttctgtccaacgacagttcccgattctatgccatgtttgctgctgcagagaacaaggtcgctgtcaagggctgactcctccctgttgacgaagtctcttttctttagagcattgccattccctgcctggggcgggcccctcatcgcgtcctcctaccgaaaccttgcctttctcgattttatctttcgcacagcagttccggattggcttgtgtgtttcacttttagggagagtcatattttgattattgtatttattccatattcatgtaaacaaaatttagtttttgttcttaattgcactctaaaaggttcagggaaccgttattataattgtatcagaggcctataatgaagctttatacgtgtagctatatctatatataattctgtacatagcctatatttacagtgaaaatgtaagctgtttattttatattaaaataagcactgtgctaataacagtgcatattcctttctatcatttttgtacagtttgctgtactagagatctggttttgctattagactgtaggaagagtagcatttcattcttctctagctggtggtttcacggtgccaggttttctgggtgtccaaaggaagacgtgtggcaatagtgggccctccgacagccccctctgccgcctccccacagccgctccaggggtggctggagacgggtgggcggctggagaccatgcagagcgccgtgagttctcagggctcctgccttctgtcctggtgtcacttactgtttctgtcaggagagcagcggggcgaagcccaggccccttttcactccctccatcaagaatggggatcacagagacattcctccgagccggggagtttctttcctgccttcttctttttgctgttgtttctaaacaagaatcagtctatccacagagagtcccactgcctcaggttcctatggctggccactgcacagagctctccagctccaagacctgttggttccaagccctggagccaactgctgctttttgaggtggcactttttcatttgcctattcccacacctccacagttcagtggcagggctcaggatttcgtgggtctgttttcctttctcaccgcagtcgtcgcacagtctctctctctctctcccctcaaagtctgcaactttaagcagctcttgctaatcagtgtctcacactggcgtagaagtttttgtactgtaaagagacctacctcaggttgctggttgctgtgtggtttggtgtgttcccgcaaaccccctttgtgctgtggggctggtagctcaggtgggcgtggtcactgctgtcatcagttgaatggtcagcgttgcatgtcgtgaccaactagacattctgtcgccttagcatgtttgctgaacaccttgtggaagcaaaaatctgaaaatgtgaataaaattattttggattttgtaaaaaaaaaaaaaaaaaaaaaaaaaaaaaaaaaaaaa

SEQ ID NO: 69 - DNA, 3106 bp, Homo sapiens
ggcggcggctcctgccctctcgctttccctctcgcgtctctggctgcaggtgaaaggaaagcaagccaggatggatatttacgacactcaaaccttgggggttgtggtctttggaggattcatggttgtttctgccattggcatcttcctggtgtcgactttctccatgaaggaaacgtcatatgaagaagccctagccaaccagcgcaaggagatggcgaaaactcaccaccagaaagtcgagaagaaaaagaaggagaaaacagtggagaagaaaggaaagaccaagaaaaaggaagagaaacctaatgggaagatacctgatcatgatccagcccccaatgtgactgtcctccttcgagaaccagtgcgggctcctgctgtggctgtggctccaaccccagtgcagccccccattatcgttgctcctgtcgccacagttccagccatgccccaggagaagctggcctcctcccccaaggacaaaaagaagaaggagaaaaaagtggcaaaagtggaaccagctgtcagctctgtagtgaattccatccaggttctcacttcgaaggctgccatcttggaaactgctcccaaggagggcagaaatacagatgtggcccagagcccagaggcaccaaagcaagaggctcctgccaagaagaagtctggttcaaagaaaaaagggcccccagatgccgacggccctctctacctcccctacaagacgctggtctccacggttgggagcatggtgttcaacgagggcgaggcccagcggctcatcgagatcctgtctgagaaggctggcatcattcaggacacctggcacaaggccactcagaagggtgaccctgtggcgattctgaaacgccagctggaagagaaggaaaaactgctggccacagaacaggaagatgcggctgtcgccaagagcaaactgagggagctcaacaaggagatggcagcagaaaaggccaaagcagcagccggggaggccaaagtgaaaaagcagctggtggcccgggagcaggagatcacggctgtgcaggcacgcatgcaggccagctaccgggagcacgtgaaggaggtgcagcagctgcagggcaagatccggactcttcaggagcagctggagaatggccccaacacgcagctggcccgcctgcagcaggagaactccatcctgcgggatgccttgaaccaggccacgagccaggtggagagcaagcagaacgcagagctggccaagcttcggcaggagctcagcaaggtcagcaaagagctggtggagaagtcagaggctgtgcggcaagatgagcagcagcggaaagctctggaagccaaggcagctgccttcgagaagcaggtcctgcagctgcaggcgtcccacagggagagtgaggaggccctgcagaagcgcctggacgaggtcagccgggagctgtgccacacgcagagcagccacgccagcctccgggcggatgccgagaaggcccaggagcaacagcagcagatggccgagctgcacagcaagttacagtcctccgaggcggaggtgcgcagcaaatgcgaggagctgagtggcctccacgggcagctccaggaggccagggcagagaactcccagctcacagagagaatccgttccattgaggccctgctggaggcgggccaggcgcgggatgcccaggacgtccaggccagccaggcggaggctgaccagcagcagactcgcctcaaggagctggagtcccaggtgtcgggtctggagaaggaggccatcgagctcagggaggccgtcgagcagcagaaagtgaagaacaatgacctccgggagaagaactggaaggccatggaggcactggccacggccgagcaggcctgcaaggagaagctgcactccctgacccaggccaaggaggaatcggagaagcagctctgtctgattgaggcgcagaccatggaggccctgctggctctgctcccagaactctctgtcttggcacaacagaattacaccgagtggctgcaggatctcaaagagaaaggccccacgctgctgaagcacccgccagctcccgcggagccctcctcggacctggcctccaagttgagggaggccgaggagacgcagagcacactgcaggccgagtgtgaccagtaccgcagcatcctggcggagacggagggcatgctcagagacctgcagaagagcgtggaggaggaggagcaggtgtggagggccaaggtgggcgccgcagaggaggagctccagaagtcccgggtcacagtgaagcatctcgaagagattgtagagaagctaaaaggagaacttgaaagttcggaccaggtgagggagcacacgtcgcatttggaggcagagctggaaaagcacatggcggccgccagcgccgagtgccagaactacgccaaggaggtggcagggctgaggcaacttctcctagaatctcaatctcagctcgatgccgccaagagcgaagcccagaaacagagcgatgagcttgccctggtcaggcagcagttgagtgaaatgaagagccacgtagaggatggtgacatagctggggccccagcttcctccccagaggcgcccccagccgagcaggaccccgttcagctgaagacgcagctggagtggacagaagccatcctggaggatgagcagacacagcggcagaagctcatggccgagtttgaggaggctcagacctcggcatgtcggttacaagaagaattggagaagctccgcacagccggccccctagagtcttcagaaacagaggaggcctcacagctgaaggagagactagaaaaagagaagaagttaacaagtgacctggggcgcgccgccacgagactgcaggagcttctgaagacgacccaggagcagctggcaagggagaaggacacggtgaagaagctgcaggaacagctggaaaaggcagaggacggcagcagctcaaaggagggcacctctgtctgagtttcctctttggaaaaagaagttactgttcaacttaccaaaatgccttacacattccttacaaataaaccaaccaacctacaaaaaaaaaaaaaaaaaaaa

SEQ ID NO: 70 - DNA, 1402 bp, Homo sapiens
ctcgcgtcacagccgggatgaagccgatcctactgcagggccatgagcggtccattacgcagattaagtataaccgcgaaggagacctcctctttactgtggccaaggaccctatcgtcaatgtatggtactctgtgaatggtgagaggctgggcacctacatgggccataccggagctgtgtggtgtgtggacgctgactgggacaccaagcatgtcctcactggctcagctgacaacagctgtcgtctctgggactgtgaaacaggaaagcagctggcccttctcaagaccaattcggctgtccggacctgcggttttgactttgggggcaacatcatcatgttctccacggacaagcagatgggctaccagtgctttgtgagcttttttgacctgcgggatccgagccagattgacaacaatgagccctacatgaagatcccttgcaatgactctaaaatcaccagtgctgtttggggacccctgggggagtgcatcatcgctggccatgagagtggagagctcaaccagtatagtgccaagtctggagaggtgttggtgaatgttaaggagcactcccggcagatcaacgacatccagttatccagggacatgaccatgtttgtgaccgcgtccaaggacaacacagccaagctttttgactccacaactcttgaacatcagaagactttccggacagaacgtcctgtcaactcagctgccctctcccccaactatgaccatgtggtcctgggcggtggtcaggaagccatggatgtaaccacaacctccaccaggattggcaagtttgaggccaggttcttccatttggcctttgaagaagagtttggaagagtcaagggtcactttggacctatcaacagtgttgccttccatcctgatggcaagagctacagcagcggcggcgaagatggttacgtccgtatccattacttcgacccacagtactttgaatttgagtttgaggcttaagaagctggatctcctgccgggcgtggttggctcatgcctgtaatcccaccactttttttttaaggcaggcggatcacctgaggtcaggagtttaagaccagcctgaccaacatggagaaacctcgtctctactaaaaatacaaaaattagccaggcatggtggcacacgcctatagtcccagctactcaggaggctgaggcaggagaatcacttgaacccaggaggcagaggttgcagtgagctgagatcacgtcattgcactccatcctgagccacaagagcaaaactccgtctcaaaaaaaaaaaagaagaaggtggatctccaaccaggccagagaagattctcacagaaggttttgaactctaagaaataaattggtttggtaataaatggcttctggtcaga

SEQ ID NO: 71 - DNA, 1652 bp, Homo sapiens
aaaaggggcgggaggccaggctcgtgccgttttgcagacgccaccgccgaggaaaaccgtgtactattagccatggtcaaccccaccgtgttcttcgacattgccgtcgacggcgagcccttgggccgcgtctcctttgagctgtttgcagacaaggtcccaaagacagcagaaaattttcgtgctctgagcactggagagaaaggatttggttataagggttcctgctttcacagaattattccagggtttatgtgtcagggtggtgacttcacacgccataatggcactggtggcaagtccatctatggggagaaatttgaagatgagaacttcatcctaaagcatacgggtcctggcatcttgtccatggcaaatgctggacccaacacaaatggttcccagtttttcatctgcactgccaagactgagtggttggatggcaagcatgtggtgtttggcaaagtgaaagaaggcatgaatattgtggaggccatggagcgctttgggtccaggaatggcaagaccagcaagaagatcaccattgctgactgtggacaactcgaataagtttgacttgtgttttatcttaaccaccagatcattccttctgtagctcaggagagcacccctccaccccatttgctcgcagtatcctagaatctttgtgctctcgctgcagttccctttgggttccatgttttccttgttccctcccatgcctagctggattgcagagttaagtttatgattatgaaataaaaactaaataacaattgtcctcgtttgagttaagagtgttgatgtaggctttattttaagcagtaatgggttacttctgaaacatcacttgtttgcttaattctacacagtacttagattttttttactttccagtcccaggaagtgtcaatgtttgttgagtggaatattgaaaatgtaggcagcaactgggcatggtggctcactgtctgtaatgtattacctgaggcagaagaccacctgagggtaggagtcaagatcagcctgggcaacatagtgagacgctgtctctacaaaaaataattagcctggcctggtggtgcatgcctagtcctagctgatctggaggctgacgtgggaggattgcttgagcctagagtgagctattatcatgccactgtacagcctgggtgttcacagatcttgtgtctcaaaggtaggcagaggcaggaaaagcaaggagccagaattaagaggttgggtcagtctgcagtgagttcatgcatttagaggtgttcttcaagatgactaatgtcaaaaattgagacatctgttgcggttttttttttttttttttcccctggaatgcagtggcgtgatctcagctcactgcagcctccgcctcctgggttcaagtgattctagtgcctcagcctcctgagtagctgggataacgggcgtgtgccaccatgcccagctaatttttgtatttttagtatagatggggtttcatcattttgaccaggctggtctcaaactcttgacctcagctgatgcgcctgccttggcctcccaaactgctgagattacagatgtgagccaccgcaccctacctcattttctgtaacaaagctaagcttgaacactgttgatgttcttgagggaagcat

SEQ ID NO: 72 - DNA, 1731 bp, Homo sapiens
gccaatcaaaaaactaattcttccaaagagcgactcttactgtttctcatggtgagaagacaatatttgctttctctttttcctttcttccggatgagaggctaagccataatagaaagaatggagaattattgattgaccgtctttattctgtgggctctgattctccaatgggaataccaagggatggttttccatactggaacccaaaggtaaagacactcaaggacagacatttttggcagagcatagatgaaaatggcaagttccctggctttccttctgctcaactttcatgtctccctcctcttggtccagctgctcactccttgctcagctcagttttctgtgcttggaccctctgggcccatcctggccatggtgggtgaagacgctgatctgccctgtcacctgttcccgaccatgagtgcagagaccatggagctgaagtgggtaagttccagcctaaggcaggtggtgaacgtgtatgcagatggaaaggaagtggaagacaggcagagtgcaccgtatcgagggagaacttcgattctgcgggatggcatcactgcagggaaggctgctctccgaatacacaacgtcacagcctctgacagtggaaagtacttgtgttatttccaagatggtgacttctatgaaaaagccctggtggagctgaaggttgcagcactgggttctaatcttcacgtcgaagtgaagggttatgaggatggagggatccatctggagtgcaggtccaccggctggtacccccaaccccaaatacagtggagcaacgccaagggagagaacatcccagctgtggaagcacctgtggttgcagatggagtgggcctatatgaagtagcagcatctgtgatcatgagaggcggctccggggagggtgtatcctgcatcatcagaaattccctcctcggcctggaaaagacagccagcatttccatcgcagaccccttcttcaggagcgcccagccctggatcgcagccctggcagggaccctgcctatcttgctgctgcttctcgccggagccagttacttcttgtggagacaacagaaggaaataactgctctgtccagtgagatagaaagtgagcaagagatgaaagaaatgggatatgctgcaacagagcgggaaataagcctaagagagagcctccaggaggaactcaagaggaaaaaaatccagtacttgactcgtggagaggagtcttcgtccgataccaataagtcagcctgatgctctaatggaaaaatggccctcttcaagcctggtgaggaaatgcttcagatgaggctccaccttgttaaataaattggatgtatggaaaaatagactgcagaaaaggggaactcatttagctcacgagtggtcgagtgaagattgaaaattaacctctgagggccagcacagcagctcatgcctgtaatcctagcactttggaaggctgaggagggcggatcacaaggtcaggagatcaagaccatcctggctaacacggtgaaaccccgtctctactaaaaatacaaaaaataaaaaattagccgggcatggtgacgggcacctgtagtcccagctactcgggaggctgaggcaggagaatggcatgaacccggaaggcagagcttgcagtgagccgagatcacgccactgcactccagcctgggagacagagcgagactctgtctcaagaaaaaaaaaaaaaaaaaaaaa

SEQ ID NO: 73 - DNA, 1067 bp, Homo sapiens
ggcggacgctccacgtgtccctcgccgcgccccgtctacccgcccctgccctgaggaccctagtccaacatggcggcgcccagcggagggtggaacggcgtcggcgcgagcttgtgggccgcgctgctcctaggggccgtggcgctgaggccggcggaggcggtgtccgagcccacgacggtggcgtttgacgtgcggcccggcggcgtcgtgcattccttctcccataacgtgggcccgggggacaaatatacgtgtatgttcacttacgcctctcaaggagggaccaatgagcaatggcagatgagtctggggaccagcgaagaccaccagcacttcacctgcaccatctggaggccccaggggaagtcctatctgtacttcacacagttcaaggcagaggtgcggggcgctgagattgagtacgccatggcctactctaaagccgcatttgaaagggaaagtgatgtccctctgaaaactgaggaatttgaagtgaccaaaacagcagtggctcacaggcccggggcattcaaagctgagctgtccaagctggtgattgtggccaaggcatcgcgcactgagctgtgaccagcagccctgttgcgggtggcaccttctcatctccggtgaagctgaaggggcctgtgtccctgaaagggccagcacatcactggttttctaggagggactcttaagttttctacctgggctgacgttgccttgtccggaggggcttgcagggtggctgaagccctggggcagagaacagagggtccagggccctcctggctcccaacagcttctcagttcccacttcctgctgagctcttctggactcaggatcgcagatccggggcacaaagagggtggggaacatgggggctatgctggggaaagcagccatgctccccccgacctccagccgagcatccttcatgagcctgcagaactgctttcctatgtttacccaggggacctcctttcagatgaactgggaagagatgaaatgttttttcatatttaaataaataagaacattaaaaagcaaaaaaaaaaaaaaaaaa

SEQ ID NO: 74 - DNA, 3402 bp, Homo sapiens
gacggcgacgcggcgcaggcggcgggagtgcgagctgggcccgtgtttcggccgccgccatggccgcggtggacctggagaagctgcgggcgtcgggcgcgggcaaggccatcggcgtcctgaccagcggcggcgacgcgcaaggtcccctgacaagcccaccaggccccctgctgagatggctgtgaccctgggctgacccgcccagtggcacattgactccgcctggagctggggagaccagagaggccctgtggttggacggtggcctgggtgcgctgctcctgccctctccttgccctgcctcagctgctgcctgccagaggcgtggcacctcacctcacacctgctccctgctgctgagccccacgccaagctggagagcggatgagaagcatgtgtaaccagggtagaggtcgagagtcctctcgtgggggtctccatgttcaagggagctgccgaggcttgagcaggagcccccagcaggaaactggctttgccaaggcccccgctgggacagactgtttctttcactgcagtcctgggagccgagggcaaggggacaggaaagaggaagtgacctcagagcctggtggcaccagcatcatgtccaggctggggggcatgaacgctgctgtccgggctgtgacgcgcatgggcatttatgtgggtgccaaagtcttcctcatctacgagggctatgagggcctcgtggagggaggtgagaacatcaagcaggccaactggctgagcgtctccaacatcatccagctgggcggcactatcattggcagcgctcgctgcaaggcctttaccaccagggaggggcgccgggcagcggcctacaacctggtccagcacggcatcaccaacctgtgcgtcatcggcggggatggcagcctcacaggtgccaacatcttccgcagcgagtggggcagcctgctggaggagctggtggcggaaggtaagatctcagagactacagcccggacctactcgcacctgaacatcgcgggcctagtgggctccatcgataacgacttctgcggcaccgacatgaccatcggcacggactcggccctccaccgcatcatggaggtcatcgatgccatcaccaccactgcccagagccaccagaggaccttcgtgctggaagtgatgggccggcactgcgggtacctggcgctggtatctgcactggcctcaggggccgactggctgttcatccccgaggctccacccgaggacggctgggagaacttcatgtgtgagaggctgggtgagactcggagccgtgggtcccgactgaacatcatcatcatcgctgagggtgccattgaccgcaacgggaagcccatctcgtccagctacgtgaaggacctggtggttcagaggctgggcttcgacacccgtgtaactgtgctgggccacgtgcagcggggagggacgccctctgccttcgaccggatcctgagcagcaagatgggcatggaggcggtgatggcgctgctggaagccacgcctgacacgccggcctgcgtggtcaccctctcggggaaccagtcagtgcggctgcccctcatggagtgcgtgcagatgaccaaggaagtgcagaaagccatggatgacaagaggtttgacgaggccacccagctccgtggtgggagcttcgagaacaactggaacatttacaagctcctcgcccaccagaagccccccaaggagaagtctaacttctccctggccatcctgaatgtgggggccccggcggctggcatgaatgcggccgtgcgctcggcggtgcggaccggcatctcccatggacacacagtatacgtggtgcacgatggcttcgaaggcctagccaagggtcaggtgcaagaagtaggctggcacgacgtggccggctggttggggcgtggtggctccatgctggggaccaagaggaccctgcccaagggccagctggagtccattgtggagaacatccgcatctatggtattcacgccctgctggtggtcggtgggtttgaggcctatgaaggggtgctgcagctggtggaggctcgcgggcgctacgaggagctctgcatcgtcatgtgtgtcatcccagccaccatcagcaacaacgtccctggcaccgacttcagcctgggctccgacactgctgtaaatgccgccatggagagctgtgaccgcatcaaacagtctgcctcggggaccaagcgccgtgtgttcatcgtggagaccatggggggttactgtggctacctggccaccgtgactggcattgctgtgggggccgacgccgcctacgtcttcgaggaccctttcaacatccacgacttaaaggtcaacgtggagcacatgacggagaagatgaagacagacattcagaggggcctggtgctgcggaacgagaagtgccatgactactacaccacggagttcctgtacaacctgtactcatcagagggcaagggcgtcttcgactgcaggaccaatgtcctgggccacctgcagcagggtggcgctccaaccccctttgaccggaactatgggaccaagctgggggtgaaggccatgctgtggttgtcggagaagctgcgcgaggtttaccgcaagggacgggtgttcgccaatgccccagactcggcctgcgtgatcggcctgaagaagaaggcggtggccttcagccccgtcactgagctcaagaaagacactgatttcgagcaccgcatgccacgggagcagtggtggctgagcctgcggctcatgctgaagatgctggcacaataccgcatcagtatggccgcctacgtgtcaggggagctggagcacgtgacccgccgcaccctgagcatggacaagggcttctgaggccagccatgcccacgcccctccccagcccccacccatgccagcgcagcgccagggctcagatggggcctgggctgttgtgtctggagcctgcaggcaggtgggggctgcgtccctgctcagcccatcccctgcctctatccctggccacctgccaggcctccctcgggctggtgtcttgagaccagcctgccaggccctccagcaggaggacagagtgccctggggcatccaccttcctgcccaggggacgtggcgctgtcggtgtttggaggctgctgccccctggctttggcgccccatgggccctcagcgtctccccatgctgggctcactacatgggccagcccttgctctacctggccggtaggctgctggcgcctaggttgtgttgagagggggatgcccctggccctgcctcactgtgacctgctcctgcccacgtgcagcacctgtcaccttttctagaaataaaatcaccctgactgtggggtgcatcggtctccggagaaaacaaaaaaa

SEQ ID NO: 75 - DNA, 1912 bp, Homo sapiens
gggcggccgacgacgttcgtcatttagtgcgggagggatcctgaaccgcgcggccgaaccctccggtgtcccgacccaggctaagcttgagcatggctgagcaggagcccacagccgagcagctggcccagattgcagcggagaacgaggaggatgagcactcggtcaactacaagcccccggcccagaagagcatccaggagatccaggagctggacaaggacgacgagagcctgcgaaagtacaaggaggccctgctgggccgcgtggccgtttccgcagaccccaacgtccccaacgtcgtggtgactggcctgaccctggtgtgcagctcggccccgggccccctggagctggacctgacgggcgacctggagagcttcaagaagcagtcgtttgtgctgaaggagggtgtggagtaccggataaaaatctctttccgggttaaccgagagatagtgtccggcatgaagtacatccagcatacgtacaggaaaggcgtcaagattgacaagactgactacatggtaggcagctatgggccccgggccgaggagtacgagttcctgacccccgtggaggaggcacccaagggtatgctggcccggggcagctacagcatcaagtcccgcttcacagacgacgacaagaccgaccacctgtcctgggagtggaatctcaccatcaagaaggactggaaggactgagcccagccagaggcgggcagggcagactgacggacggacgacggacaggcggatgtgtcccccccagcccctcccctccccataccaaagtgctgacaggccctccgtgcccctcccaccctggtccgcctccctggcctggctcaaccgagtgcctccgacccccctcctcagccctcccccacccacaggcccagcctcctcggtctcctgtctcgttgctgcttctgcctgtgctgtgggggagagaggccgcagccaggcctctgctgccctttctgtgccccccaggttctatctccccgtcacacccgaggcctggcttcaggagggagcggagcagccattctccaggccccgtggttgcccctggacgtgtgcgtctgctgctccggggtggagctggggtgtgggatgcacggcctcgtgggggccgggccgtcctccagccccgctgctccctggccagcccccttgtcgctgtcggtcccgtctaaccatgatgccttaacatgtggagtgtaccgtggggcctcactagcctctaactccctgtgtctgcatgagcatgtggcctccccgtcccttccccggtggcgaacccagtgacccagggacacgtggggtgtgctgctgctgctccccagcccaccagtgcctggccagcctgcccccttccctggacagggctgtggagatggctccggcggcttggggaaagccaaattgccaaaactcaagtcacctcagtaccatccaggaggctgggtattgtcctgcctctgccttttctgtctcagcgggcagtgcccagagcccacacccccccaagagccctcgatggacagcctcacccaccccacctgggcccagccaggagccccgcctggccatcagtatttattgcctccgtccgtgccgtccctgggccactggcctggcgcctgttcccccaggctctcagtgccaccacccccggcaggccttccctgacccagccaggaacaaacaagggaccaagtgcacacattgctgagagccgtctcctgtgcctcccccgccccatccccggtcttcgtgttgtgtctgccaggctcaggcagaggcgcctgtccctgcttcttttctgaccgggaaataaatgcccctgaaggaaaaaaaaaaaaaaaaaaaaaaaaaaaaaaaaaaaaaaaaaaaaaaaaaaa

SEQ ID NO: 76 - DNA, 2815 bp, Homo sapiens
aggaagcggaggaaggtgaagtaggaccgaattcctgtgccgaagaggcctgcagtgggagagcaggatgggggctccggaggtggcgcccaggctctgagctaccctaggtctgcagactagcgggcattggccagagacatggcccagccactggccttcatcctcgatgtccctgagaccccaggggaccagggccagggccccagcccctatgatgaaagcgaagtgcacgactccttccagcagctcatccaggagcagagccagtgcacggcccaggaggggctggagctgcagcagagagagcgggaggtgacaggaagtagccagcagacactctggcggcccgagggcacccagagcacggccacactccgcatcctggccagcatgcccagccgcaccattggccgcagccgaggtgccatcatctcccagtactacaaccgcacggtgcagcttcggtgcaggagcagccggcccctgctcgggaactttgtccgctccgcctggcccagcctccgcctgtacgacctggagctggaccccacggccctggaggaggaggagaagcagagcctcctggtgaaggagttccagagcctggcagtggcacagcgggaccacatgcttcgcgggatgcccttaagcctggctgagaaacgcagcctgcgagagaagagcaggaccccgagggggaagtggaggggccagccgggcagcggcggggtctgctcctgctgtggccggctcagatatgcctgcgtgctggccttgcacagcctgggcctggcgctgctctccgccctgcaggccctgatgccgtggcgctacgccctgaagcgcatcgggggccagttcggctccagcgtgctctcctacttcctctttctcaagaccctgctggctttcaatgccctcctgctgctgctgctggtggccttcatcatgggccctcaggtcgccttcccacccgccctgccgggccctgcccccgtctgcacaggcctggagctcctcacaggcgcgggttgcttcacccacaccgtcatgtactacggccactacagtaacgccacgctgaaccagccgtgtggcagccccctggatggcagccagtgcacacccagggtgggtggcctgccctacaacatgcccctggcctacctctccactgtgggcgtgagcttctttatcacctgcatcaccctggtgtacagcatggctcactctttcggggagagctaccgggtgggcagcacctctggcatccacgccatcaccgtcttctgctcctgggactacaaggtgacgcagaagcgggcctcccgcctccagcaggacaatattcgcacccggctgaaggagctgctggccgagtggcagctgcggcacagccccaggagcgtgtgcgggaggctgcggcaggcggctgtgctggggcttgtgtggctgctgtgtctggggaccgcgctgggctgcgccgtggccgtccacgtcttctcggagttcatgatccagagtccagaggctgctggccaggaggctgtgctgctggtcctgcccctggtggttggcctcctcaacctgggggccccctacctgtgccgtgtcctggccgccctggagccgcatgactccccggtactggaggtgtacgtggccatctgcaggaacctcatcctcaagctggccatcctggggacactgtgctaccactggctgggccgcagggtgggcgtcctgcagggccagtgctgggaggattttgtgggccaggagctgtaccggttcctggtgatggacttcgtcctcatgttgctggacacgctttttggggaactggtgtggaggattatctccgagaagaagctgaagaggaggcggaagccggagtttgacattgcccggaatgtcctggagctgatttatgggcagactctgacctggctgggggtgctcttctcgcccctcctccccgccgtgcagatcatcaagctgctgctcgtcttctatgtcaagaagaccagccttctggccaactgccaggcgccgcgccggccctggctggcctcacacatgagcaccgtcttcctcacgctgctctgcttccccgccttcctgggcgccgctgtcttcctctgctacgccgtctggcaggtgaagccctcgagcacctgcggccccttccggaccctggacaccatgtacgaggccggcagggtgtgggtgcgccacctggaggcggcaggccccagggtctcctggctgccctgggtgcaccggtacctgatggaaaacaccttctttgtcttcctggtgtcagccctgctgctggccgtgatctacctcaacatccaggtggtgcggggccagcgcaaggtcatctgcctgctcaaggagcagatcagcaatgagggtgaggacaaaatcttcttaatcaacaagcttcactccatctacgagaggaaggagagggaggagaggagcagggttgggacaaccgaggaggctgcggcaccccctgccctgctcacagatgaacaggatgcctagggggacggcgatgggcctcacgggcccgcccagcaccctgagaccacactgttgcctcccagtgaccctgctgggacaccaggacaaggaagacagtttcgcctctcgaaagccgcagctgcgcctaggctggagctggaagggtgggtgaatccggcttgggcatccccaatgaactctgccctgcctgggactctatttattctgattaaaggggttttgcaaatgggaaaaaaaaaaaaaaaaaaaaaaaaaa

SEQ ID NO: 77 - DNA, 1740 bp, Homo sapiens
ccagcgttagcccgcggccaggcagccgggaggagcggcgcgcgctcggacctctcccgccctgctcgttcgctctccagcttgggatggccggctacctgcgggtcgtgcgctcgctctgcagagcctcaggctcgcggccggcctgggcgccggcggccctgacagcccccacctcgcaagagcagccgcggcgccactatgccgacaaaaggatcaaggtggcgaagcccgtggtggagatggatggtgatgagatgacccgtattatctggcagttcatcaaggagaagctcatcctgccccacgtggacatccagctaaagtattttgacctcgggctcccaaaccgtgaccagactgatgaccaggtcaccattgactctgcactggccacccagaagtacagtgtggctgtcaagtgtgccaccatcacccctgatgaggcccgtgtggaagagttcaagctgaagaagatgtggaaaagtcccaatggaactatccggaacatcctgggggggactgtcttccgggagcccatcatctgcaaaaacatcccacgcctagtccctggctggaccaagcccatcaccattggcaggcacgcccatggcgaccagtacaaggccacagactttgtggcagaccgggccggcactttcaaaatggtcttcaccccaaaagatggcagtggtgtcaaggagtgggaagtgtacaacttccccgcaggcggcgtgggcatgggcatgtacaacaccgacgagtccatctcaggttttgcgcacagctgcttccagtatgccatccagaagaaatggccgctgtacatgagcaccaagaacaccatactgaaagcctacgatgggcgtttcaaggacatcttccaggagatctttgacaagcactataagaccgacttcgacaagaataagatctggtatgagcaccggctcattgatgacatggtggctcaggtcctcaagtcttcgggtggctttgtgtgggcctgcaagaactatgacggagatgtgcagtcagacatcctggcccagggctttggctcccttggcctgatgacgtccgtcctggtctgccctgatgggaagacgattgaggctgaggccgctcatgggaccgtcacccgccactatcgggagcaccagaagggccggcccaccagcaccaaccccatcgccagcatctttgcctggacacgtggcctggagcaccgggggaagctggatgggaaccaagacctcatcaggtttgcccagatgctggagaaggtgtgcgtggagacggtggagagtggagccatgaccaaggacctggcgggctgcattcacggcctcagcaatgtgaagctgaacgagcacttcctgaacaccacggacttcctcgacaccatcaagagcaacctggacagagccctgggcaggcagtagggggaggcgccacccatggctgcagtggaggggccagggctgagccggcgggtcctcctgagcgcggcagagggtgagcctcacagcccctctctggaggcctttctaggggatgtttttttataagccagatgtttttaaaagcatatgtgtgtttcccctcatggtgacgtgaggcaggagcagtgcgttttacctcagccagtcagtatgttttgcatactgtaatttatattgcccttggaacacatggtgccatatttagctactaaaaagctcttcacaaaaaaaaaaa

SEQ ID NO: 78 - DNA, 3929 bp, Homo sapiens
ccctttttcctcccgttttgaagagacaatgctacttcagtttggagcacaaacatatgatcagcacatggaaatgtggtaattcggatgcattcgtgattgcaacagattgaagaaattagaccagacaaagagtgtttttagaggagagaggaggaggaggaggctgagagagggagggcgacgggggtgagaaaggggaggccgcctctgagcgggacgccgggactcccgccgctgctaaatatatccgtagaatggagagggaccggatctcagccttgaaaagatcttttgaggtcgaggaggtcgagacacccaactccaccccaccccggagggtccagactcccctactccgagccactgtggccagctccacccagaaattccaggacctgggcgtgaagaactcagaaccctcggcccgccatgtggactccctaagccaacgctcccccaaggcgtccctgcggagggtggagctctcgggccccaaggcggccgagccggtgtcccggcgcactgagctgtccattgacatctcgtccaagcaggtggagaacgccggggccatcggcccgtcccggttcgggctcaagagggccgaggtgttgggccacaagacgccagaaccggcccctcggaggacggagatcaccatcgtcaaaccccaggagtcagcccaccggaggatggagccccctgcctccaaggtccccgaggtgcccactgcccctgccaccgacgcagcccccaagagggtggagatccagatgcccaagcctgctgaggcgcccaccgcccccagcccagcccagaccttggagaattcagagcctgcccctgtgtctcagctgcagagcaggctggagcccaagccccagccccctgtggctgaggctacaccccggagccaggaggccactgaggcggctcccagctgcgttggcgacatggccgacacccccagagatgccgggctcaagcaggcgcctgcatcacggaacgagaaggccccggtggacttcggctacgtggggattgactccatcctggagcagatgcgccggaaggccatgaagcagggcttcgagttcaacatcatggtggtcgggcagagcggcttgggtaaatccaccttaatcaacaccctcttcaaatccaaaatcagccggaagtcggtgcagcccacctcagaggagcgcatccccaagaccatcgagatcaagtccatcacgcacgatattgaggagaaaggcgtccggatgaagctgacagtgattgacacaccagggttcggggaccacatcaacaacgagaactgctggcagcccatcatgaagttcatcaatgaccagtacgagaaatacctgcaggaggaggtcaacatcaaccgcaagaagcgcatcccggacacccgcgtccactgctgcctctacttcatccccgccaccggccactccctcaggcccctggacatcgagtttatgaaacgcctgagcaaggtggtcaacatcgtccctgtcatcgccaaggcggacacactcaccctggaggagagggtccacttcaaacagcggatcaccgcagacctgctgtccaacggcatcgacgtgtacccccagaaggaatttgatgaggactcggaggaccggctggtgaacgagaagttccgggagatgatcccatttgctgtggtgggcagtgaccacgagtaccaggtcaacggcaagaggatccttgggaggaagaccaagtggggtaccatcgaagttgaaaacaccacacactgtgagtttgcctacctgcgggaccttctcatcaggacgcacatgcagaacatcaaggacatcaccagcagcatccacttcgaggcgtaccgtgtgaagcgcctcaacgagggcagcagcgccatggccaacggcgtggaggagaaggagccagaagccccggagatgtagacgccccctgcccacccccgggatcctgcccccaagtcatttccgtcccccccccaggccctcccaccaccccattttattttatatgattttctccatttgtcatcgttccccaccccttcgacatgctgccaggaaacaagggaaggggcctccctccgagtgagtcagtgatgaggccgcggcctccccgaggttgtggggaggctgcactggagccacaggcaggggtgagagcacccactgaattgacatgaccctctgtccccaggcctggctccccgagggctcagaagagcagcttcggtgtgcagatcatccgtcgtgtggggttctcagtgccggagcttggggtgggggccaggcctcgcacttgcagaggagcccagtgggctgcacgctcccctccatccccatcggccctgtcccctggagtgtgtcagagcccaggggagaatgcagcccaccaggagcacctggaccccctgcccgccacatggtgtggccatcactcagcccctacccctgccctgctcctaagggtagaaaactccagggtcccctgccaccgactgcccagccactccaagccccctggcagctgcccctcctggagcagaaagtgcctttatctcagccatccgcagactgctggccagatgcggggacaggctggaatgagggaggcgtcttcatctccctgccatccccctctcacgccacccccgcccccaccgggctgcaggtgctgctgatgcgctgggatctgattgaggataaaaaggaaggagagatgacccctaccccctcatcccccagttttgaaaaggtctaagcaagtgagtctggtggaggagctgagggagggagccatggaaggtgccagaaggaaggttggcgggggcacgtgtgggccgtggcttgggctggtcagagtggcgtgagctgcccggcgcctgccctgcccaagtgaccagggaagtgtgtgtgtgtccatgtgtatgcgtgtccgtctgtctgtctagtgtctgggtttggcccaagactgggctgtagttacattaatgcccagccagccacccctgccactcacccctcctggcccaggccttgctgactctctgagctggggaggtgggaggccaggcgagcctgactctgttgatctacccgtgcctgggcccctcccctcagagcccatggtaacgaacccctagaaaggagagaacgggcgtcaggggtgcacagtccacagctgaagagcaaggtttcgtggcagcacggcccggcccctcaccctctgtccccacgaggggacccatgggggctgtctttgcagggcacagatgaccaaagtcccttcctgcttcctgttacctgtcttgctcctggggagaaagaggggcctgatgagactccactcaggtgcacacatcaccaggtgcatctgcaggcaccgggctggctgcttgcagccaggagaaggtcagcgagaaggagtgtatgagtgtgagtgtgtgtgcatggaagttggggcactgggcgtctgactccctccccacccaagagaggaaggacccctcaccacccccactggcgagacagtttactttgccgacttgccatgtttttgccaaaaccaagattttgaaggaaatgagtggccagcgccagggcccaggccatgtggcctgcccagcctcaatgtcacttggcggcggggtggggtgggggtgggcagcagcatcccagccttgagatgcttcactttccttctctgtaaccagactttgaaaaattgttcgtttcatcaggctctgttcctcaatggccttttgctacgtgcctcccgagaaatttgtctttttgtataaatgacaaagtgttgaaaatgtatttcctgaaataaatgtttcaaatgcagaaacccaaaaaaaaaaaaaaaaaaaaaaaaaaaaaaaaaaa

SEQ ID NO: 79 - DNA, 2911 bp, Homo sapiens
ctccagcctccgccggcggagcccactatgccagacagtttcgacactttgcaaagacaaagagccctagaccggagggaggaggaggaggaagaagagcggagagagaaggaagaggcgatgtgagctgggaagggggcaagtgtccgggacacccacacccctgtattctcctccgaaccccttcatgcccaaatcccggaaactccagcgtgtctccagccgtgttggtaccattttcagatttcatcttcctaaactggaaatgtcaatgagaggaaattaacacccccaagagctgcagtgagcaaatgcattgagcttgggtcaggacaattccatttggggaccagagatggacggtcactcagcctatggagatgaagaaactgaggttcagagaggttaagagactccactgaggtcacacagccgatgacagacaaccttctgtgccttcatcaagctggttgtgtacccaccatgtccctggcgacaggatgggaaagaaaaagccctaattaaggatcgtcagaaaccacagttggaggaggacggcagagacagtttccctccccgctataccaacacccttccttcgaggtcctcgctcctgagggaccctggactgtcacagagattaatgaccccttatcttctttggatgtgaaaggaaatcactggttaaagcttgatcgagagacattatcagctctttaaggattgcagaagaataggctactttattttctgaaaaggtaaatatatgcaagcaaagccaacatgccacgaatggcgttggtctaccacacagccgtgtctgggacacagttgggggtcatcccccagcaggagtgaagtcgagcttagcggcccttgtgtcctcccttggaattcctgccatcccttttgattgagcctccacctctgggatttttcttccatttttctcctctcttaggagggagttcctgctacccatcgtgggaggccaccatcaggactgcgaagatggtgaccctgcggaagaggaccctgaaagtgctcaccttcctcgtgctcttcatcttcctcacctccttcttcctgaactactcccacaccatggtggccaccacctggttccccaagcagatggtcctggagctctccgagaacctgaagagactgatcaagcacaggccttgcacctgcacccactgcatcgggcagcgcaagctctcggcctggttcgatgagaggttcaaccagaccatgcagccgctgctgaccgcccagaacgcgctcttggaggacgacacctaccgatggtggctgaggctccagcgggagaagaagcccaataacttgaatgacaccatcaaggagctgttcagagtggtgcctgggaatgtggaccctatgctggagaagaggtcggtgggctgccggcgctgcgccgttgtgggcaactcgggcaacctgagggagtcttcttatgggcctgagatagacagtcacgactttgtcctcaggatgaacaaggcgcccacggcagggtttgaagctgatgttgggaccaagaccacccaccatctggtgtaccctgagagcttccgggagctgggagataatgtcagcatgatcctggtgcccttcaagaccatcgacttggagtgggtggtgagcgccatcaccacgggcaccatttcccacacctacatcccggttcctgcaaagatcagagtgaaacaggataagatcctgatctaccacccagccttcatcaagtatgtctttgacaactggctgcaagggcacgggcgatacccatctaccggcatcctctcggtcatcttctcaatgcatgtctgcgatgaggtggacttgtacggcttcggggcagacagcaaagggaactggcaccactactgggagaacaacccatccgcgggggcttttcgcaagacgggggtgcacgatgcagactttgagtctaacgtgacggccaccttggcctccatcaataaaatccggatcttcaaggggagatgacgcagtgaagggctgaggatggacgcactgtcacacctctgcatttccagccccagcatcttgctggagccgttccatcccggagcttggaggggcagcctcaggtgtgtgcctgggcaccgctcacagcctcttgcacccagccgttggcagcatctactcagcaaggtcactaagctctgccagcgtggcagagcatgtcttggaacctgtcttgagtggggacaacgtccccccactgctgccctagagctggggagacgctgggaaaggttcaacctccacacactaaaatcattttggctcctggggcaagcttggggaatgaatgtggaagatgcctatattctgagagacaggacagtttcccaggaagatgggcagagacttgagtggcgattacctccagcacagagacgtgccaggcggtgttggcgctcggggcgagatgctgcccttctttgcacgaagcctggcctcttgcttggcgtgataaccctgtcatcttcccaaagctcatttatgagccaccagaggctcctaccccaaagattttcacagaaacttgaggccaggtgccgtggctcacacctgtaatctgaacactttgggaggccgaggcgggaggatcacttgagcccaggagttcaagaccagcctgggcaacatagtgagactcctgtctctacaaaaataaaagatttaaaaaaattagccaggcacggtggcacacacttgtagccccagctactagggaggctgaggagggaggatctcttgtgcctaggagttcgaggctgcagtgggctgtgatcacaccactgcactccagcctgggcaacagagtgagaccctgtctctgaaaaaaaaaaaaaaa

SEQ ID NO: 80 - DNA, 2479 bp, Homo sapiens
cgccgcgcttcctcctgaaggtgactgcgcccgcggggacgcagggggcggggcccgggtcgcccggagccgggattgggcagagggcggggcggcggagggattgcggcggcccgcagcgggataaccttgaggctgaggcagtggctccttgcacagcagctgcacgcgccgtggctccggatctcttcgtctttgcagcgtagcccgagtcggtcagcgccggaggacctcagcagccatgtcgaagccccatagtgaagccgggactgccttcattcagacccagcagctgcacgcagccatggctgacacattcctggagcacatgtgccgcctggacattgattcaccacccatcacagcccggaacactggcatcatctgtaccattggcccagcttcccgatcagtggagacgttgaaggagatgattaagtctggaatgaatgtggctcgtctgaacttctctcatggaactcatgagtaccatgcggagaccatcaagaatgtgcgcacagccacggaaagctttgcttctgaccccatcctctaccggcccgttgctgtggctctagacactaaaggacctgagatccgaactgggctcatcaagggcagcggcactgcagaggtggagctgaagaagggagccactctcaaaatcacgctggataacgcctacatggaaaagtgtgacgagaacatcctgtggctggactacaagaacatctgcaaggtggtggaagtgggcagcaagatctacgtggatgatgggcttatttctctccaggtgaagcagaaaggtgccgacttcctggtgacggaggtggaaaatggtggctccttgggcagcaagaagggtgtgaaccttcctggggctgctgtggacttgcctgctgtgtcggagaaggacatccaggatctgaagtttggggtcgagcaggatgttgatatggtgtttgcgtcattcatccgcaaggcatctgatgtccatgaagttaggaaggtcctgggagagaagggaaagaacatcaagattatcagcaaaatcgagaatcatgagggggttcggaggtttgatgaaatcctggaggccagtgatgggatcatggtggctcgtggtgatctaggcattgagattcctgcagagaaggtcttccttgctcagaagatgatgattggacggtgcaaccgagctgggaagcctgtcatctgtgctactcagatgctggagagcatgatcaagaagccccgccccactcgggctgaaggcagtgatgtggccaatgcagtcctggatggagccgactgcatcatgctgtctggagaaacagccaaaggggactatcctctggaggctgtgcgcatgcagcacctgattgcccgtgaggcagaggctgccatctaccacttgcaattatttgaggaactccgccgcctggcgcccattaccagcgaccccacagaagccaccgccgtgggtgccgtggaggcctccttcaagtgctgcagtggggccataatcgtcctcaccaagtctggcaggtctgctcaccaggtggccagataccgcccacgtgcccccatcattgctgtgacccggaatccccagacagctcgtcaggcccacctgtaccgtggcatcttccctgtgctgtgcaaggacccagtccaggaggcctgggctgaggacgtggacctccgggtgaactttgccatgaatgttggcaaggcccgaggcttcttcaagaagggagatgtggtcattgtgctgaccggatggcgccctggctccggcttcaccaacaccatgcgtgttgttcctgtgccgtgatggaccccagagcccctcctccagcccctgtcccacccccttcccccagcccatccattaggccagcaacgcttgtagaactcactctgggctgtaacgtggcactggtaggttgggacaccagggaagaagatcaacgcctcactgaaacatggctgtgtttgcagcctgctctagtgggacagcccagagcctggctgcccatcatgtggccccacccaatcaagggaagaaggaggaatgctggactggaggcccctggagccagatggcaagagggtgacagcttcctttcctgtgtgtactctgtccagttcctttagaaaaaatggatgcccagaggactcccaaccctggcttggggtcaagaaacagccagcaagagttaggggccttagggcactgggctgttgttccattgaagccgactctggccctggcccttacttgcttctctagctctctaggcctctccagtttgcacctgtccccaccctccactcagctgtcctgcagcaaacactccaccctccaccttccattttcccccactactgcagcacctccaggcctgttgctatagagcctacctgtatgtcaataaacaacagctgaagcaccaaaaaaaaaaaaaaaaaaaaa

SEQ ID NO: 81 - DNA, 3925 bp, Homo sapiens
acagcacagacagattgacctattggggtgtttcgcgagtgtgagagggaagcgccgcggcctgtatttctagacctgcccttcgcctggttcgtggcgccttgtgaccccgggcccctgccgcctgcaagtcggaaattgcgctgtgctcctgtgctacggcctgtggctggactgcctgctgctgcccaactggctggcaagatgaagctctccctggtggccgcgatgctgctgctgctcagcgcggcgcgggccgaggaggaggacaagaaggaggacgtgggcacggtggtcggcatcgacctggggaccacctactcctgcgtcggcgtgttcaagaacggccgcgtggagatcatcgccaacgatcagggcaaccgcatcacgccgtcctatgtcgccttcactcctgaaggggaacgtctgattggcgatgccgccaagaaccagctcacctccaaccccgagaacacggtctttgacgccaagcggctcatcggccgcacgtggaatgacccgtctgtgcagcaggacatcaagttcttgccgttcaaggtggttgaaaagaaaactaaaccatacattcaagttgatattggaggtgggcaaacaaagacatttgctcctgaagaaatttctgccatggttctcactaaaatgaaagaaaccgctgaggcttatttgggaaagaaggttacccatgcagttgttactgtaccagcctattttaatgatgcccaacgccaagcaaccaaagacgctggaactattgctggcctaaatgttatgaggatcatcaacgagcctacggcagctgctattgcttatggcctggataagagggagggggagaagaacatcctggtgtttgacctgggtggcggaaccttcgatgtgtctcttctcaccattgacaatggtgtcttcgaagttgtggccactaatggagatactcatctgggtggagaagactttgaccagcgtgtcatggaacacttcatcaaactgtacaaaaagaagacgggcaaagatgtcaggaaagacaatagagctgtgcagaaactccggcgcgaggtagaaaaggccaaacgggccctgtcttctcagcatcaagcaagaattgaaattgagtccttctatgaaggagaagacttttctgagaccctgactcgggccaaatttgaagagctcaacatggatctgttccggtctactatgaagcccgtccagaaagtgttggaagattctgatttgaagaagtctgatattgatgaaattgttcttgttggtggctcgactcgaattccaaagattcagcaactggttaaagagttcttcaatggcaaggaaccatcccgtggcataaacccagatgaagctgtagcgtatggtgctgctgtccaggctggtgtgctctctggtgatcaagatacaggtgacctggtactgcttgatgtatgtccccttacacttggtattgaaactgtgggaggtgtcatgaccaaactgattccaaggaacacagtggtgcctaccaagaagtctcagatcttttctacagcttctgataatcaaccaactgttacaatcaaggtctatgaaggtgaaagacccctgacaaaagacaatcatcttctgggtacatttgatctgactggaattcctcctgctcctcgtggggtcccacagattgaagtcacctttgagatagatgtgaatggtattcttcgagtgacagctgaagacaagggtacagggaacaaaaataagatcacaatcaccaatgaccagaatcgcctgacacctgaagaaatcgaaaggatggttaatgatgctgagaagtttgctgaggaagacaaaaagctcaaggagcgcattgatactagaaatgagttggaaagctatgcctattctctaaagaatcagattggagataaagaaaagctgggaggtaaactttcctctgaagataaggagaccatggaaaaagctgtagaagaaaagattgaatggctggaaagccaccaagatgctgacattgaagacttcaaagctaagaagaaggaactggaagaaattgttcaaccaattatcagcaaactctatggaagtgcaggccctcccccaactggtgaagaggatacagcagaaaaagatgagttgtagacactgatctgctagtgctgtaatattgtaaatactggactcaggaacttttgttaggaaaaaattgaaagaacttaagtctcgaatgtaattggaatcttcacctcagagtggagttgaaactgctatagcctaagcggctgtttactgcttttcattagcagttgctcacatgtctttgggtgggggggagaagaagaattggccatcttaaaaagcaggtaaaaaacctgggttagggtgtgtgttcaccttcaaaatgttctatttaacaactgggtcatgtgcatctggtgtaggaagttttttctaccataagtgacaccaataaatgtttgttatttacactggtctaatgtttgtgagaagcttctaattagatcaattacttattttaggaaatttaagactagatactcgtgtgtggggtgaggggagggagtatttggtatgttgggataaggaaacacttctatttaatgcttccagggattttttttttttttttttaaccctcctgggcccaagtgatccttccacctcagtctcccagctaattgagaccacaggcttgttaccaccatgctcggcttttgcattaatctaagaaaaggggagagaagttaatccacatctttactcaggcaaggggcatttcacagtgcccaagagtggggttttcttgaacatacttggtttcctatttccccttatctttctaaaactgcctttctggtggctttttttaaaattattactaatgatgcttttatagctgcttggattctctgagaaatgatggggagtgagtgatcactggtattaactttatacacttggatttcatttgtaactttaggatgtaaaggtatattgtgaaccctagctgtgtcagaatctccatccctgaaatttctcattagtggtactggggtgggatcttggatggtgacattgaaactacactaaatcccctcactatgaatgggttgttaaaggcaatggtttgtgtcaaaactggtttaggattacttagattgtgttcctgaagaaaagagtccaggtaaatggtatgatcaataaaggacaggctggtgctaacataaaatccaatattgtaatcctagcactttgggaggccaaggcgggtggatcacaaggtcaagagatagagaccatctttgccaacatggtgaaactccatctctactgaaaatacaaaaattagctgggcgtggtagtgcaagctgaaggctgaggcaggagaatcactcgaacccgggaggcagaggttgcagtgagccgagatcacaccactgtactccagcccggcactccagcctggcgacaagagtgagactccacctcaaaaaaaaaaaaaagaatccaatactgcccaaggataggtattttatagatgggcaactggctgaaaggttaattctctagggctagtagaactggatcccaacaccaaactcttaattagacctaggcctcagctgcactgcccgaaaagcatttgggcagaccctgagcagaatactggtctcaggccaagcccaatacagccattaaagatgacctacagtgctgtgtaccctggggcaatagggttaaatggtagttagcaactagggctagtcttcccttacctcaaaggctctcactaccgtggaccacctagtctgtaactctttctgaggagctgttactgaatattaaaaagatagacttcaaaaaaaaaaaaaaaaaa

SEQ ID NO: 82 - DNA, 1694 bp, Homo sapiens
ggcggcggcagcggcggcgacggcgacatggagagcggggcctacggcgcggccaaggcgggcggctccttcgacctgcggcgcttcctgacgcagccgcaggtggtggcgcgcgccgtgtgcttggtcttcgccttgatcgtgttctcctgcatctatggtgagggctacagcaatgcccacgagtctaagcagatgtactgcgtgttcaaccgcaacgaggatgcctgccgctatggcagtgccatcggggtgctggccttcctggcctcggccttcttcttggtggtcgacgcgtatttcccccagatcagcaacgccactgaccgcaagtacctggtcattggtgacctgctcttctcagctctctggaccttcctgtggtttgttggtttctgcttcctcaccaaccagtgggcagtcaccaacccgaaggacgtgctggtgggggccgactctgtgagggcagccatcaccttcagcttcttttccatcttctcctggggtgtgctggcctccctggcctaccagcgctacaaggctggcgtggacgacttcatccagaattacgttgaccccactccggaccccaacactgcctacgcctcctacccaggtgcatctgtggacaactaccaacagccacccttcacccagaacgcggagaccaccgagggctaccagccgccccctgtgtactgagcggcggttagcgtgggaagggggacagagagggccctcccctctgccctggactttcccatgagcctcctggaactgccagcccctctctttcacctgttccatcctgtgcagctgacacacagctaaggagcctcatagcctggcgggggctggcagagccacaccccaagtgcctgtgcccagagggcttcagtcagccgctcactcctccagggcacttttaggaaagggtttttagctagtgtttttcctcgcttttaatgacctcagccccgcctgcagtggctagaagccagcaggtgcccatgtgctactgacaagtgcctcagcttccccccggcccgggtcaggccgtgggagccgctattatctgcgttctctgccaaagactcgtgggggccatcacacctgccctgtgcagcggagccggaccaggctcttgtgtcctcactcaggtttgcttcccctgtgcccactgctgtatgatctgggggccaccaccctgtgccggtggcctctgggctgcctcccgtggtgtgagggcggggctggtgctcatggcacttcctccttgctcccacccctggcagcagggaagggctttgcctgacaacacccagctttatgtaaatattctgcagttgttacttaggaagcctggggagggcaggggtgccccatggctcccagactctgtctgtgccgagtgtattataaaatcgtgggggagatgcccggcctgggatgctgtttggagacggaataaatgttttctcattcagtctccagtcattggttgagccacagcctaggggttggaggaagactccactctgggtacacccttaggggctggctttatggaacttgtagtttgaacaaggcagtggcaatccgccccctccagcctgcctggctggcccccttccctctgtctggggtcgcattccgcacaagcctttcatcaacatcttaaaatagtaactgtg

SEQ ID NO: 83 - DNA, 2373 bp, Homo sapiens
cccaggcccaccccacccagcacccctggcgcagggactgctggaacctggctgtgcgcgctgtcgctttaagacagactctgccggcgccgtccggagccttagaaaccggccccggatcgcgagccggagccggagccggagccggggccggccgggctgctgaggcccgagcggcaggagcgcagcgcggagcgctgagccaggcgcccagtcgcgagaagctgccgccgcctctgcccgcccggcgccgcagccccgggcggtccatggggcgggcacggcgtcgctgcaggcgccggcagccctggagggcagccgcttaggcgctgcgctcttgtccccgcaggtcgcagccagggcggcggggcgcgcccagccccggcccctggagcgcccgccgcggtccccacctccatggacgccttcaaggggggcatgagcctggagcggctgccggaggggctccggccgccgccgccgccaccccatgacatggggcccgccttccacctggcccggcccgccgacccccgcgagccgctcgagaactccgccagcgagtcgtctgacacggagctgccagagaaggagcgcggcggggaacccaaggggcccgaggacagtggtgcgggaggcacgggctgcggcggcgcagacgacccagccaagaagaagaagcagcggcggcaacgtacgcacttcacaagccagcagttgcaagagctagaggccacgttccagaggaaccgctaccccgacatgagcatgagggaggagatcgccgtgtggaccaacctcaccgagccgcgcgtgcgggtctggttcaagaaccggcgagccaagtggcgtaagcgcgagcgtaaccagcagctggacctgtgcaagggtggctacgtgccgcagttcagcggcctagtgcagccctacgaggacgtgtacgccgccggctactcctacaacaactgggccgccaagagcctggcgccagcgccgctctccaccaagagcttcaccttcttcaactccatgagcccgctgtcgtcgcagtccatgttctcagcacccagctccatctcctccatgaccatgccgtccagcatgggcccaggcgccgtgcctggcatgcccaactcgggcctcaacaacatcaacaacctcaccggctcctcgctcaactcggccatgtcgccgggcgcttgcccgtacggcactcccgcctcgccctacagcgtctaccgggacacgtgcaactcgagcctagccagcctgcggctcaagtccaaacagcactcgtcgtttggctacggcgccctgcagggcccggcctcgggcctcaacgcgtgccagtacaacagctgaccgccccgccgcaccacgcgggccggcggccggagcggggaagggcgcgggcgcggaggacgcacgcggggccccggctcgcaagccccagctcaccgcgccgcggacctcacacctgcgcagccccctcctcccacttcccactccgggttggttttgtgtttgcttttccggaccccactctgccctccaaaaagacaaaaaaaaaaaaaaaaaaaaaagcaaaaagacgtcggagaaaagtgccgcgaaaaaatggatgagttgcaatttctctcgggatggcgcgggtggtgtgtgtgtgttcccacgggccccggaggcccactccgcggagggcacgcggcgcggtaggcgagcgccgaggcccagcggccgggggaggacgacctcgtatcccgcgtccccgccgcgctggatccggactgagtggccgggcctgcggactggatgtgcggggcctggacttgcctaggatttcccgaccccgtacaaaccaagttgccctctccgagctaggcccggccgagagcgccttagctcgagtcggatccgtgttggggcgggcgttgggtttggggggacggtgcccccagcccaggatcgggcactcagtggagccgcacacggccccggcgcgcctggtagagcctcgctggccccgcgccccggagccctatattaaggccacggagcgacagcgggcagtgcgggcctggcgggaggtgggggaggtccatctcagaacaccccagccttgagcttagctgcaggcccaggccctctgctctgctcccgggctaggaggtggccctctgtctgggcgaacagccccctcctcaccgcccgccgtgcaagagtcgagccggcagagcaaggggcgcggccccagggccctgcgcccactttgcacacccgctctccggcccgcgcccctgtttacagcgtccctgtgtatgttggactgactgtaataaatctgtctatatcgactaaaaaaaaaaaaaaaaa

SEQ ID NO: 84 - DNA, 530 bp, Homo sapiens
acgccagggagctgtgaggcagtgctgtgtggttcctgccgtccggactctttttcctctactgagattcatctgtgtgaaatatgagttggcgaggaagatcgacctatcggcctagaccaagacgctacgtagagcctcctgaaatgattgggcctatgcggcccgagcagttcagtgatgaagtggaaccagcaacacctgaagaaggggaaccagcaactcaacgtcaggatcctgcagctgctcaggagggagaggatgagggagcatctgcaggtcaagggccgaagcctgaagctcatagccaggaacagggtcacccacagactgggtgtgagtgtgaagatggtcctgatgggcaggagatggacccgccaaatccagaggaggtgaaaacgcctgaagaaggtgaaaagcaatcacagtgttaaaagaagacacgttgaaatgatgcaggctgctcctatgttggaaatttgttcattaaaattctcccaataaagctttacagccttctgcaaagaaaa

SEQ ID NO: 85 - DNA, 1543 bp, Homo sapiens
ggccgagatgcgggtcatggcgccccgagccctcctcctgctgctctcgggaggcctggccctgaccgagacctgggcctgctcccactccatgaggtatttcgacaccgccgtgtcccggcccggccgcggagagccccgcttcatctcagtgggctacgtggacgacacgcagttcgtgcggttcgacagcgacgccgcgagtccgagaggggagccgcgggcgccgtgggtggagcaggaggggccggagtattgggaccgggagacacagaagtacaagcgccaggcacaggctgaccgagtgagcctgcggaacctgcgcggctactacaaccagagcgaggacgggtctcacaccctccagaggatgtctggctgcgacctggggcccgacgggcgcctcctccgcgggtatgaccagtccgcctacgacggcaaggattacatcgccctgaacgaggacctgcgctcctggaccgccgcggacaccgcggctcagatcacccagcgcaagttggaggcggcccgtgcggcggagcagctgagagcctacctggagggcacgtgcgtggagtggctccgcagatacctggagaacgggaaggagacgctgcagcgcgcagaacccccaaagacacacgtgacccaccaccccctctctgaccatgaggccaccctgaggtgctgggccctgggcttctaccctgcggagatcacactgacctggcagcgggatggggaggaccagacccaggacaccgagcttgtggagaccaggccagcaggagatggaaccttccagaagtgggcagctgtggtggtgccttctggacaagagcagagatacacgtgccatatgcagcacgaggggctgcaagagcccctcaccctgagctgggagccatcttcccagcccaccatccccatcatgggcatcgttgctggcctggctgtcctggttgtcctagctgtccttggagctgtggtcaccgctatgatgtgtaggaggaagagctcaggtggaaaaggagggagctgctctcaggctgcgtgcagcaacagtgcccagggctctgatgagtctctcatcacttgtaaagcctgagacagctgcctgtgtgggactgagatgcaggatttcttcacacctctcctttgtgacttcaagagcctctggcatctctttctgcaaaggcacctgaatgtgtctgcgttcctgttagcataatgtgaggaggtggagagacagcccacccccgtgtccaccgtgacccctgtccccacactgacctgtgttccctccccgatcatctttcctgttccagagaggtggggctggatgtctccatctctgtctcaaattcatggtgcactgagctgcaacttcttacttccctaatgaagttaagaacctgaatataaatttgtgttctcaaatatttgctatgaagcgttgatggattaattaaataagtcaattcctagaagttgagagagcaaataaagacctgagaaccttccaaaaaaaaaaaaaaaaaaa

SEQ ID NO: 86 - DNA, 2059 bp, Homo sapiens
agtcatttcttctgcggaacctccacccctccagtgggtgcgggaccctaggcagcaggccaggcaccgccgctctgactgggggccccgaagcagttaacgggccggacagcaaagtggaaagttagaccagctgggaccaggggaggtgggcacccggctgcgggaggagcggccaggctggcactgcccccctaacttgctctcgatcctgccggtctcgtcccgcagagccggtgccatctgtgggggctttgggccaggggtctccggacagcatgagcgtgggcttcatcggcgctggccagctggcttttgccctggccaagggcttcacagcagcaggcgtcttggctgcccacaagataatggctagctccccagacatggacctggccacagtttctgctctcaggaagatgggggtgaagttgacaccccacaacaaggagacggtgcagcacagtgatgtgctcttcctggctgtgaagccacacatcatccccttcatcctggatgaaataggcgccgacattgaggacagacacattgtggtgtcctgcgcggccggcgtcaccatcagctccattgagaagaagctgtcagcgtttcggccagcccccagggtcatccgctgcatgaccaacactccagtcgtggtgcgggagggggccaccgtgtatgccacaggcacgcacgcccaggtggaggacgggaggctcatggagcagctgctgagcagcgtgggcttctgcacggaggtggaagaggacctgattgatgccgtcacggggctcagtggcagcggccccgcctacgcattcacagccctggatgccctggctgatgggggtgtgaagatgggacttccaaggcgcctggcagtccgcctcggggcccaggccctcctgggggctgccaagatgctgctgcactcagaacagcacccaggccagctcaaggacaacgtcagctctcctggtggggccaccatccatgccttgcatgtgctggagagtgggggcttccgctccctgctcatcaacgctgtggaggcctcctgcatccgcacacgggagctgcagtccatggctgaccaggagcaggtgtcaccagccgccatcaagaagaccatcctggacaaggtgaagctggactcccctgcagggaccgctctgtcgccttctggccacaccaagctgctcccccgcagcctggccccagcgggcaaggattgacacgtcctgcctgaccaccatcctgccaccaccttctcttctcttgtcactagggggactagggggtccccaaagtggcccactttctgtggctctgatcagcgcaggggccagccagggacatagccagggaggggccacatcacttcccactggaaatctctgtggtctgcaagtgcttcccagcccagaacaggggtggattccccaacctcaacctcctttcttctctgctcccaaaccatgtcaggaccaccttcctctagagctcgggagcccggagggtcttcacccactcctactccagtatcagctggcacgggctccttcctgagagcaaaggtcaaggaccccctctgtgaaggctcagcagaggtgggatcccacgccccctcccggcccctccctgccctccattcagggagaaacctctccttcccgtgtgagaagggccagagggtccaggcatcccaagtccagcgtgaagggccacagcccctcttggctgccaagcacgcagatcccatggacatttggggaaagggctccttgggctgctggtgaacttctgtggccaccacctcctgctcctgacctccctgggagggtgctatcagttctgtcctggccctttcagttttataagttggtttccagcccccagtgtcctgacttctgtctgccacatgaggagggaggccctgcctgtgtgggagggtggttactgtgggtggaatagtggaggccttcaactgattagacaaggcccgcccacatcttggagggcatctgccttactgattaaaatgtcaatgtaatct

SEQ ID NO: 87 - DNA, 4953 bp, Homo sapiens
ggtttccggagctgcggcggcgcagactgggagggggagccgggggttccgacgtcgcagccgagggaacaagccccaaccggatcctggacaggcaccccggcttggcgctgtctctccccctcggctcggagaggcccttcggcctgagggagcctcgccgcccgtccccggcacacgcgcagccccggcctctcggcctctgccggagaaacaggatggcccaatggaatcagctacagcagcttgacacacggtacctggagcagctccatcagctctacagtgacagcttcccaatggagctgcggcagtttctggccccttggattgagagtcaagattgggcatatgcggccagcaaagaatcacatgccactttggtgtttcataatctcctgggagagattgaccagcagtatagccgcttcctgcaagagtcgaatgttctctatcagcacaatctacgaagaatcaagcagtttcttcagagcaggtatcttgagaagccaatggagattgcccggattgtggcccggtgcctgtgggaagaatcacgccttctacagactgcagccactgcggcccagcaagggggccaggccaaccaccccacagcagccgtggtgacggagaagcagcagatgctggagcagcaccttcaggatgtccggaagagagtgcaggatctagaacagaaaatgaaagtggtagagaatctccaggatgactttgatttcaactataaaaccctcaagagtcaaggagacatgcaagatctgaatggaaacaaccagtcagtgaccaggcagaagatgcagcagctggaacagatgctcactgcgctggaccagatgcggagaagcatcgtgagtgagctggcggggcttttgtcagcgatggagtacgtgcagaaaactctcacggacgaggagctggctgactggaagaggcggcaacagattgcctgcattggaggcccgcccaacatctgcctagatcggctagaaaactggataacgtcattagcagaatctcaacttcagacccgtcaacaaattaagaaactggaggagttgcagcaaaaagtttcctacaaaggggaccccattgtacagcaccggccgatgctggaggagagaatcgtggagctgtttagaaacttaatgaaaagtgcctttgtggtggagcggcagccctgcatgcccatgcatcctgaccggcccctcgtcatcaagaccggcgtccagttcactactaaagtcaggttgctggtcaaattccctgagttgaattatcagcttaaaattaaagtgtgcattgacaaagactctggggacgttgcagctctcagaggatcccggaaatttaacattctgggcacaaacacaaaagtgatgaacatggaagaatccaacaacggcagcctctctgcagaattcaaacacttgaccctgagggagcagagatgtgggaatgggggccgagccaattgtgatgcttccctgattgtgactgaggagctgcacctgatcacctttgagaccgaggtgtatcaccaaggcctcaagattgacctagagacccactccttgccagttgtggtgatctccaacatctgtcagatgccaaatgcctgggcgtccatcctgtggtacaacatgctgaccaacaatcccaagaatgtaaacttttttaccaagcccccaattggaacctgggatcaagtggccgaggtcctgagctggcagttctcctccaccaccaagcgaggactgagcatcgagcagctgactacactggcagagaaactcttgggacctggtgtgaattattcagggtgtcagatcacatgggctaaattttgcaaagaaaacatggctggcaagggcttctccttctgggtctggctggacaatatcattgaccttgtgaaaaagtacatcctggccctttggaacgaagggtacatcatgggctttatcagtaaggagcgggagcgggccatcttgagcactaagcctccaggcaccttcctgctaagattcagtgaaagcagcaaagaaggaggcgtcactttcacttgggtggagaaggacatcagcggtaagacccagatccagtccgtggaaccatacacaaagcagcagctgaacaacatgtcatttgctgaaatcatcatgggctataagatcatggatgctaccaatatcctggtgtctccactggtctatctctatcctgacattcccaaggaggaggcattcggaaagtattgtcggccagagagccaggagcatcctgaagctgacccaggcgctgccccatacctgaagaccaagtttatctgtgtgacaccaacgacctgcagcaataccattgacctgccgatgtccccccgcactttagattcattgatgcagtttggaaataatggtgaaggtgctgaaccctcagcaggagggcagtttgagtccctcacctttgacatggagttgacctcggagtgcgctacctcccccatgtgaggagctgagaacggaagctgcagaaagatacgactgaggcgcctacctgcattctgccacccctcacacagccaaaccccagatcatctgaaactactaactttgtggttccagattttttttaatctcctacttctgctatctttgagcaatctgggcacttttaaaaatagagaaatgagtgaatgtgggtgatctgcttttatctaaatgcaaataaggatgtgttctctgagacccatgatcaggggatgtggcggggggtggctagagggagaaaaaggaaatgtcttgtgttgttttgttcccctgccctcctttctcagcagctttttgttattgttgttgttgttcttagacaagtgcctcctggtgcctgcggcatccttctgcctgtttctgtaagcaaatgccacaggccacctatagctacatactcctggcattgcactttttaaccttgctgacatccaaatagaagataggactatctaagccctaggtttctttttaaattaagaaataataacaattaaagggcaaaaaacactgtatcagcatagcctttctgtatttaagaaacttaagcagccgggcatggtggctcacgcctgtaatcccagcactttgggaggccgaggcggatcataaggtcaggagatcaagaccatcctggctaacacggtgaaaccccgtctctactaaaagtacaaaaaattagctgggtgtggtggtgggcgcctgtagtcccagctactcgggaggctgaggcaggagaatcgcttgaacctgagaggcggaggttgcagtgagccaaaattgcaccactgcacactgcactccatcctgggcgacagtctgagactctgtctcaaaaaaaaaaaaaaaaaaaagaaacttcagttaacagcctccttggtgctttaagcattcagcttccttcaggctggtaatttatataatccctgaaacgggcttcaggtcaaacccttaagacatctgaagctgcaacctggcctttggtgttgaaataggaaggtttaaggagaatctaagcattttagacttttttttataaatagacttattttcctttgtaatgtattggccttttagtgagtaaggctgggcagagggtgcttacaaccttgactccctttctccctggacttgatctgctgtttcagaggctaggttgtttctgtgggtgccttatcagggctgggatacttctgattctggcttccttcctgccccaccctcccgaccccagtccccctgatcctgctagaggcatgtctccttgcgtgtctaaaggtccctcatcctgtttgttttaggaatcctggtctcaggacctcatggaagaagagggggagagagttacaggttggacatgatgcacactatggggccccagcgacgtgtctggttgagctcagggaatatggttcttagccagtttcttggtgatatccagtggcacttgtaatggcgtcttcattcagttcatgcagggcaaaggcttactgataaacttgagtctgccctcgtatgagggtgtatacctggcctccctctgaggctggtgactcctccctgctggggccccacaggtgaggcagaacagctagagggcctccccgcctgcccgccttggctggctagctcgcctctcctgtgcgtatgggaacacctagcacgtgctggatgggctgcctctgactcagaggcatggccggatttggcaactcaaaaccaccttgcctcagctgatcagagtttctgtggaattctgtttgttaaatcaaattagctggtctctgaattaagggggagacgaccttctctaagatgaacagggttcgccccagtcctcctgcctggagacagttgatgtgtcatgcagagctcttacttctccagcaacactcttcagtacataataagcttaactgataaacagaatatttagaaaggtgagacttgggcttaccattgggtttaaatcatagggacctagggcgagggttcagggcttctctggagcagatattgtcaagttcatggccttaggtagcatgtatctggtcttaactctgattgtagcaaaagttctgagaggagctgagccctgttgtggcccattaaagaacagggtcctcaggccctgcccgcttcctgtccactgccccctccccatccccagcccagccgagggaatcccgtgggttgcttacctacctataaggtggtttataagctgctgtcctggccactgcattcaaattccaatgtgtacttcatagtgtaaaaatttatattattgtgaggttttttgtcttttttttttttttttttttttggtatattgctgtatctactttaacttccagaaataaacgttatataggaaccgtaaaaa

SEQ ID NO: 88 - DNA, 2000 bp, Homo sapiens
cttggcacgagggattggtctgtgctcctctctcggctcctcgcggctcgcggcggccgacggttcctgggacacctgcttgcttggcccgtccggcggctcagggcttctctgctgcgctcccggttcgctggacgggaagaagggctgggccgtcccgtcccgtccccatcggaaccccaagtcgcgccgctgacccgtcgcagggcgagatgagcgcggacgcagcggccggggcgcccctgccccggctctgctgcctggagaagggtccgaacggctacggcttccacctgcacggggagaagggcaagttgggccagtacatccggctggtggagcccggctcgccggccgagaaggcggggctgctggcgggggaccggctggtggaggtgaacggcgaaaacgtggagaaggagacccaccagcaggtggtgagccgcatccgcgccgcactcaacgccgtgcgcctgctggtggtcgaccccgagacggacgagcagctgcagaagctcggcgtccaggtccgagaggagctgctgcgcgcccaggaagcgccggggcaggccgagccgccggccgccgccgaggtgcagggggctggcaacgaaaatgagcctcgcgaggccgacaagagccacccggagcagcgcgagcttcggcctcggctctgtaccatgaagaagggccccagtggctatggcttcaacctgcacagcgacaagtccaagccaggccagttcatccggtcagtggacccagactccccggctgaggcttcagggctccgggcccaggatcgcattgtggaggtgaacggggtctgcatggaggggaagcagcatggggacgtggtgtccgccatcagggctggcggggacgagaccaagctgctggtggtggacagggaaactgacgagttcttcaagaaatgcagagtgatcccatctcaggagcacctgaatggtcccctgcctgtgcccttcaccaatggggagatacagaaggagaacagtcgtgaagccctggcagaggcagccttggagagccccaggccagccctggtgagatccgcctccagtgacaccagcgaggagctgaattcccaagacagccccccaaaacaggactccacagcgccctcgtctacctcctcctccgaccccatcctagacttcaacatctccctggccatggccaaagagagggcccaccagaaacgcagcagcaaacgggccccgcagatggactggagcaagaaaaacgaactcttcagcaacctctgagcgccctgctgccacccagtgactggcagggccgagccagcattccaccccacctttttccttctccccaattactcccctgaatcaatgtacaaatcagcacccacatcccctttcttgacaaatgatttttctagagaactatgttcttccctgactttagggaaggtgaatgtgttcccgtcctcccgcagtcagaaaggagactctgcctccctcctcctcactgagtgcctcatcctaccgggtgtccctttgccaccctgcctgggacatcgctggaacctgcaccatgccaggatcatgggaccaggcgagagggcaccctcccttcctcccccatgtgataaatgggtccagggctgatcaaagaactctgactgcagaactgccgctctcagtggacagggcatctgttatcctgaaccttggcagacacgtcttgttttcatttgattttgttaagagtgcagtattgcagagtctagaggaatttttgtttccttgattaacatgattttcctggttgttaatccagggcatggcagtggcctcagccttaaacttttgttcctactcccaccctcagcgaactgggcagcacggggagggtttggctacccctgcccatccctgagccaggtaccaccattgtaaggaaacactttcagaaattcagctggttcctccaaaccaaaaaaaaaaaaaaaa

SEQ ID NO: 89 - DNA, 2000 bp, Homo sapiens
attttcctggggctccggggcgcggagaagctgcatcccagaggagcgcgtccaggagcggacccgggagtgtttcaagagccagtgacaaggaccaggggcccaagtcccaccagccatgcagacctgccccctggcattccctggccacgtttcccaggcccttgggaccctcctgtttttggctgcctccttgagtgctcagaatgaaggctgggacagccccatctgcacagagggggtagtctctgtgtcttggggcgagaacaccgtcatgtcctgcaacatctccaacgccttctcccatgtcaacatcaagctgcgtgcccacgggcaggagagcgccatcttcaatgaggtggctccaggctacttctcccgggacggctggcagctccaggttcagggaggcgtggcacagctggtgatcaaaggcgcccgggactcccatgctgggctgtacatgtggcacctcgtgggacaccagagaaataacagacaagtcacgctggaggtttcaggtgcagaaccccagtccgcccctgacactgggttctggcctgtgccagcggtggtcactgctgtcttcatcctcttggtcgctctggtcatgttcgcctggtacaggtgccgctgttcccagcaacgccgggagaagaagttcttcctcctagaaccccagatgaaggtcgcagccctcagagcgggagcccagcagggcctgagcagagcctccgctgaactgtggaccccagactccgagcccaccccaaggccgctggcactggtgttcaaaccctcaccacttggagccctggagctgctgtccccccaacccttgtttccatatgccgcagacccatagccgcctgcaaggcagagaggacacaggagagccagccctgagtgccgaccttgggtggcggggcctgggtctctcgtcccacccggagggcacagacaccggcttgcttggcaggctgggcctctgtgtcacccactcctgggtgcgtgcagacccttcccctccaccccccaggtcttccaagctctgcttcctcagtttccaaaatggaaccacctcacctccgcagcacccgacttaccaggacgcatgcccctccctctgccctcatcaaacccacagacccggactccctttctgccaccccaggctggtccggccccaggtgtggggtccgctctctccactcccagggctccgcgcccaagtgagggggcccctgccggagcctcagacacactggagttcagggctgggggggccttggcacatacctgtcccttggctatgagcaggctttgggggcccttccgcggcagccccgggggccgaggtagggtctgggggcttagaggctgggatggctcctggccccaccgccagggggcaagcgcaggccgggctgggaggcggcggcggcggctcgggctggggggtcaggtggacgctgcctccggggctggtcgcgcatccctcagtccctcggccacccgggggtcgctccctcgtgcccaccgcacctgccgagcctctttggacccagatctgttcatgcttttgtcttcgtcactgcggcggggccctttgatgtcttcatctgtatggggtggaaaaatcaccgggaatcccccttcagttctttgaaaaagttccatgactcgaatatctgaaatgaagaaaacaaaccgactcacaaacctccaagtagctccaaatgcaatttttaaaatggaaaacaaaaatctgaaagaaacgtctttagtggctttaagccccaaaacgtccctaaggcgtcctcgagatgaagacgggggggagcccccagccaggtggagaccccgcaggacgcggcggcgcccggtgaccgaggcctcgcacagccggccgccctgagggtcgggccggagccagggtccaagaggggcgcgtttgtgtctcgggttaaaataaggttccgtccgcgtgctgggtcaga

SEQ ID NO: 90 - DNA, 3992 bp, Homo sapiens
ataaaagctgcccggggaagccaggagagcgaagggcggacgtactcgccacggcacccaggctgcgcgcacgcggtcccggtgtgcagctggagagcgagcggccaccgggagcccccggcacagcccgcgcccgccccgcaggagcccgcgaagatgccccggcgcagcctgcacgcggcggccgtgctcctgctggtgatcttaaaggaacagccttccagcccggccccagtgaacggttccaagtggacttattttggtcctgatggggagaatagctggtccaagaagtacccgtcgtgtgggggcctgctgcagtcccccatagacctgcacagtgacatcctccagtatgacgccagcctcacgcccctcgagttccaaggctacaatctgtctgccaacaagcagtttctcctgaccaacaatggccattcagtgaagctgaacctgccctcggacatgcacatccagggcctccagtctcgctacagtgccacgcagctgcacctgcactgggggaacccgaatgacccgcacggctctgagcacaccgtcagcggacagcacttcgccgccgagctgcacattgtccattataactcagacctttatcctgacgccagcactgccagcaacaagtcagaaggcctcgctgtcctggctgttctcattgagatgggctccttcaatccgtcctatgacaagatcttcagtcaccttcaacatgtaaagtacaaaggccaggaagcattcgtcccgggattcaacattgaagagctgcttccggagaggaccgctgaatattaccgctaccgggggtccctgaccacacccccttgcaaccccactgtgctctggacagttttccgaaaccccgtgcaaatttcccaggagcagctgctggctttggagacagccctgtactgcacacacatggacgacccttcccccagagaaatgatcaacaacttccggcaggtccagaagttcgatgagaggctggtatacacctccttctcccaagtgcaagtctgtactgcggcaggactgagtctgggcatcatcctctcactggccctggctggcattcttggcatctgtattgtggtggtggtgtccatttggcttttcagaaggaagagtatcaaaaaaggtgataacaagggagtcatttacaagccagccaccaagatggagactgaggcccacgcttgaggtccccggagctcccgggcacatccaggaaggaccttgctttggaccctacacacttcggctctctggacacttgcgacacctcaaggtgttctctgtagctcaatctgcaaacatgccaggcctcagggatcctctgctgggtgcctccttgccttgggaccatggccaccccagagccatccgatcgatggatgggatgcactctcagaccaagcagcaggaattcaaagctgcttgctgtaactgtgtgagattgtgaagtggtctgaattctggaatcacaaaccaagccatgctggtgggccattaatggttggaaaacactttcatccggggctttgccagagcgtgctttcaagtgtcctggaaattctgctgcttctccaagctttcagacaagaatgtgcactctctgcttaggttttgcttgggaaactcaacttctttcctctggagacggggcatctccctctgatttccttctgctatgacaaaacctttaatctgcaccttacaactcggggacaaatggggacaggaaggatcaagttgtagagagaaaaagaaaacaagagatatacattgtgatatattagggacactttcacagtcctgtcctctggatcacagacactgcacagaccttagggaatggcaggttcaagttccacttcttggtggggatgagaagggagagagagctagagggacaaagagaatgagaagacatggatgatctgggagagtctcactttggaatcagaattggaatcacattctgtttatcaagccataatgtaaggacagaataatacaatattaagtccaaatccaacctcctgtcagtggagcagttatgttttatactctacagattttacaaataatgaggctgttccttgaaaatgtgttgttgctgtgtcctggaggagacatgagttccgagatgacccaatctgcctttgaatctggaggaaataggcagaaacaaaatgactgtagaacttattctctgtaggccaaatttcatttcagccacttctgcaggatccctactgccaacctggaatggagacttttatctacttctctctctctgaagatgtcaaatcgtggtttagatcaaatatatttcaagctataaaagcaggaggttatctgtgcagggggctggcatcatgtatttaggggcaagtaataatggaatgctactaagatactccatattcttccccgaatcacacagacagtttctgacaggcgcaactcctccattttcctcccgcaggtgagaaccctgtggagatgagtcagtgccatgactgagaaggaaccgacccctagttgagagcaccttgcagttccccgagaactttctgattcacagtctcattttgacagcatgaaatgtcctcttgaagcatagctttttaaatatctttttccttctactcctccctctgactctaagaattctctcttctggaatcgcttgaacccaggaggcggaggttgcagtaagccaaggtcatgccactgcactctagcctgggtgacagagcgagactccatctcaaaaaaaaaaaaaaaaaaattattctgtaccatcacaacttttcacaacgatggcaagccttatgtcttgggagcctgttttgctaggcaaagttacaagtgacctaatgggagctcaaatgtgtgtgtgtctctctgtgtgtttgtgtgtgtgtgtgcactcaagacctctaacagcctcgaagcctggggtggcatcccggccttgccattagcatgcctcatgcatcatcagatgacaaggacaaccctcatgacgaagcaacatgaattagggggcctcttggccttggtccaaaattgtcaatcagaaatgaacataaaggactccagagcagtgggactgtctgtcaaaagactctgtatatcttttgtggatgagttttgtgagagaacagagagaccattgtacctggcacaagggctgttcatgaaaagggagacttactgggaggtgcaagacagtggcatttctcctctcctcttgctgctcagcacagccctggattgcagccccgaggctgagaccagacaaagcccgggaggcagaaagatgctccaagaaccaacactatcaatgtctttgcaaatcctcacaggattcctgtgggtccagctttggaactgggaaacctttcttcggatccgcactcattccactgatgccagctgcccctgaaggatgccagtactgtggtgtgtgagtctcagcagccgcccacacgctcctaactctgctgcatggcagatgcctaggtggaaatagcaaaaacaaggcccaggctggggccagggccagaggggaaggccctggattctcactcatgtgagatcttgaatctctttctttgttctgtttgtttagttagtatcatctggtaaaatagttaaaaaacaacaaaaaactctgtatctgtttctagcatgtgctgcattgactctattaatcacatttcaaattcaccctacattcctctcctcttcactagcctctctgaaggtgtcctggccagccctggagaagcactggtgtctgcagcacccctcagttcctgtgcctcagcccacaggccactgtgataatggtctgtttagcacttctgtatttattgtaagaatgattataatgaagatacacactgtaactacaagaaattataaatgtttttcacatcaaaaaaaaaaaaaaaaaa

SEQ ID NO: 91 - DNA, 1841 bp, Homo sapiens
actgcgccgccaccgtcaataggtggaccccctcccggagataaaaccgccggcgccggcgccgccagtccctctggctgagacctcggctccggaatcactgcagcccccctcgccctgagccagagcaccccgggtcccgccagcccctcacactcccagcaaaatgggcaaggagaagacccacatcaacatcgtggtcatcggccacgtggactccggaaagtccaccaccacgggccacctcatctacaaatgcggaggtattgacaaaaggaccattgagaagttcgagaaggaggcggctgagatggggaagggatccttcaagtatgcctgggtgctggacaagctgaaggcggagcgtgagcgcggcatcaccatcgacatctccctctggaagttcgagaccaccaagtactacatcaccatcatcgatgcccccggccaccgcgacttcatcaagaacatgatcacgggtacatcccaggcggactgcgcagtgctgatcgtggcggcgggcgtgggcgagttcgaggcgggcatctccaagaatgggcagacgcgggagcatgccctgctggcctacacgctgggtgtgaagcagctcatcgtgggcgtgaacaaaatggactccacagagccggcctacagcgagaagcgctacgacgagatcgtcaaggaagtcagcgcctacatcaagaagatcggctacaacccggccaccgtgccctttgtgcccatctccggctggcacggtgacaacatgctggagccctcccccaacatgccgtggttcaagggctggaaggtggagcgtaaggagggcaacgcaagcggcgtgtccctgctggaggccctggacaccatcctgccccccacgcgccccacggacaagcccctgcgcctgccgctgcaggacgtgtacaagattggcggcattggcacggtgcccgtgggccgggtggagaccggcatcctgcggccgggcatggtggtgacctttgcgccagtgaacatcaccactgaggtgaagtcagtggagatgcaccacgaggctctgagcgaagctctgcccggcgacaacgtcggcttcaatgtgaagaacgtgtcggtgaaggacatccggcggggcaacgtgtgtggggacagcaagtctgacccgccgcaggaggctgctcagttcacctcccaggtcatcatcctgaaccacccggggcagattagcgccggctactccccggtcatcgactgccacacagcccacatcgcctgcaagtttgcggagctgaaggagaagattgaccggcgctctggcaagaagctggaggacaaccccaagtccctgaagtctggagacgcggccatcgtggagatggtgccgggaaagcccatgtgtgtggagagcttctcccagtacccgcctctcggccgcttcgccgtgcgcgacatgaggcagacggtggccgtaggcgtcatcaagaacgtggagaagaagagcggcggcgccggcaaggtcaccaagtcggcgcagaaggcgcagaaggcgggcaagtgaagcgcgggcgcccgcggcgcgaccctccccggcggcgccgcgctccgaaccccggcccggcccccgccccgcccccgccccgcgcgccgctccggcgccccgcacccccgccaggcgcatgtctgcacctccgcttgccagaggccctcggtcagcgactggatgctcgccatcaaggtccagtggaagttcttcaagaggaaaggcgcccccgccccaggcttccgcgcccagcgctcgccacgctcagtgcccgttttaccaataaactgagcgaccccag

SEQ ID NO: 92 - DNA, 2160 bp, Homo sapiens
agccccctgcccctcgccgccccccgccgcctgcctgggccgggccgaggatgcggcgcagcgcctcggcggccaggcttgctcccctccggcacgcctgctaacttcccccgctacgtccccgttcgcccgccgggccgccccgtctccccgcggcctccgggtccgggtcctccaggacggccaggccgtgccgccgtgtgccctccgccgctcgcccgcgcgccgcgcgctccccgcctgcgcccagcgccccgcgcccgcgccccagtcctcgggcggtccatgctgcccctctgcctcgtggccgccctgctgctggccgccgggcccgggccgagcctgggcgacgaagccatccactgcccgccctgctccgaggagaagctggcgcgctgccgcccccccgtgggctgcgaggagctggtgcgagaggcgggctgcggctgttgcgccacttgcgccctgggcttggggatgccctgcggggtgtacaccccccgttgcggctcgggcctgcgctgctacccgccccgaggggtggagaagcccctgcacacactgatgcacgggcaaggcgtgtgcatggagctggcggagatcgaggccatccaggaaagcctgcagccctctgacaaggacgagggtgaccaccccaacaacagcttcagcccctgtagcgcccatgaccgcaggtgcctgcagaagcacttcgccaaaattcgagaccggagcaccagtgggggcaagatgaaggtcaatggggcgccccgggaggatgcccggcctgtgccccagggctcctgccagagcgagctgcaccgggcgctggagcggctggccgcttcacagagccgcacccacgaggacctctacttcatccccatccccaactgcgaccgcaacggcaacttccaccccaagcagtgtcacccagctctggatgggcagcgtggcaagtgctggtgtgtggaccggaagacgggggtgaagcttccggggggcctggagccaaagggggagctggactgccaccagctggctgacagctttcgagagtgaggcctgccagcaggccagggactcagcgtcccctgctactcctgtgctctggaggctgcagagctgacccagagtggagtctgagtctgagtcctgtctctgcctgcggcccagaagtttccctcaaatgcgcgtgtgcacgtgtgcgtgtgcgtgcgtgtgtgtgtgtttgtgagcatgggtgtgcccttggggtaagccagagcctggggtgttctctttggtgttacacagcccaagaggactgagactggcacttagcccaagaggtctgagccctggtgtgtttccagatcgatcctggattcactcactcactcattccttcactcatccagccacctaaaaacatttactgaccatgtactacgtgccagctctagttttcagccttgggaggttttattctgacttcctctgattttggcatgtggagacactcctataaggagagttcaagcctgtgggagtagaaaaatctcattcccagagtcagaggagaagagacatgtaccttgaccatcgtccttcctctcaagctagcccagagggtgggagcctaaggaagcgtggggtagcagatggagtaatggtcacgaggtccagacccactcccaaagctcagacttgccaggctccctttctcttcttccccaggtccttcctttaggtctggttgttgcaccatctgcttggttggctggcagctgagagccctgctgtgggagagcgaagggggtcaaaggaagacttgaagcacagagggctagggaggtggggtacatttctctgagcagtcagggtgggaagaaagaatgcaagagtggactgaatgtgcctaatggagaagacccacgtgctaggggatgaggggcttcctgggtcctgttcccctaccccatttgtggtcacagccatgaagtcaccgggatgaacctatccttccagtggctcgctccctgtagctctgcctccctctccatatctccttcccctacacctccctccccacacctccctactcccctgggcatcttctggcttgactggatggaaggagacttaggaacctaccagttggccatgatgtcttttctt

SEQ ID NO: 93 - DNA, 809 bp, Homo sapiens
atgcctgtcttcatcttgaaagaaaagctccaggtcccttctccagccacccagccccaagatggtgatgctgctgctgctgctttccgcactggctggcctcttcggtgcggcagagggacaagcatttcatcttgggaagtgccccaatcctccggtgcaggagaattttgacgtgaataagtatctcggaagatggtacgaaattgagaagatcccaacaacctttgagaatggacgctgcatccaggccaactactcactaatggaaaacggaaagatcaaagtgttaaaccaggagttgagagctgatggaactgtgaatcaaatcgaaggtgaagccaccccagttaacctcacagagcctgccaagctggaagttaagttttcctggtttatgccatcggcaccgtactggatcctggccaccgactatgagaactatgccctcgtgtattcctgtacctgcatcatccaactttttcacgtggattttgcttggatcttggcaagaaaccctaatctccctccagaaacagtggactctctaaaaaatatcctgacttctaataacattgatgtcaagaaaatgacggtcacagaccaggtgaactgccccaagctctcgtaaccaggttctacagggaggctgcacccactccatgttacttctgcttcgctttcccctaccccacccccccccataaagacaaaccaatcaaccacgacaaaggaagttgacctaaacatgtaaccatgccctaccctgttaccttgctagctgcaaaataaacttgttgctgacctgc

SEQ ID NO: 94 - DNA, 2496 bp, Homo sapiens
ctctcttgcctgccgccatgtgcctttcgccttctgccgtgattgtgaggcctccccagccatatggaagttcaggatgtctgcccgtggcccggctatcggcatcgacctgggcaccacctattcgtgcgtcggggtcttccaacatggcaaggtggagatcatcgccaacgaccagggcaatcgcaccacccccagctacgtggccttcacggacaccgagcgcctcatcggcgacgccgccaagaaccaggtggccatgaaccccaccaacaccatcttcgacgccaagaggctgattggacggaaattcgaggatgccacagtgcagtcggatatgaaacactggccgttccgggtggtgagcgagggaggcaagcccaaagtgcaagtagagtacaagggggagaccaagaccttcttcccagaggagatatcctccatggtcctcacgaagatgaaggagatcgcggaagcctacctggggggcaaggtgcacagcgcggtcataacggtcccggcctatttcaacgactcgcagcgccaggccaccaaggacgcaggcaccatcacggggctcaatgtgctgcgcatcatcaacgagcccacggcggcggccatcgcctacggcctggacaagaagggctgcgcgggcggcgagaagaacgtgctcatctttgacctgggcggtggcactttcgacgtgtccatcctgaccatcgaggatggcatcttcgaggtgaagtccacggccggcgacacccacctgggcggtgaggacttcgacaaccgcatggtgagccacctggcggaggagttcaagcgcaagcacaagaaggacattgggcccaacaagcgcgccgtgaggcggctgcgcaccgcttgcgagcgcgccaagcgcaccctgagctcgtccacgcaggcgagcatcgagatcgactcgctctacgagggcgtggacttctatacgtccatcacgcgcgcccgcttcgaggagctcaatgccgacctctttcgcgggaccctggagccggtggagaaggcgctgcgcgacgccaagctggacaagggccagatccaggagatcgtgctggtgggcggctccactcgtatccccaagatccagaagctgctgcaggatttcttcaacggcaaggagctgaacaagagcatcaaccccgacgaggcggtggcctatggcgccgcggtgcaggcggccatcctcatcggcgacaaatcagagaatgtgcaggacctgctgctactcgacgtgaccccgttgtcgctgggcatcgagacagctggcggtgtcatgaccccactcatcaagaggaacaccacgatccccaccaagcagacgcagaccttcaccacctactcggacaaccagagcagcgtactggtgcaggtatacgagggcgaacgggccatgaccaaggacaataacctgctgggcaagttcgacctgaccgggattccccctgcgcctcgcggggtcccccaaatcgaggttaccttcgacattgacgccaatggcatccttaacgttaccgccgccgacaagagcaccggtaaggaaaacaaaatcaccatcaccaatgacaaaggtcgtctgagcaaggacgacattgaccggatggtgcaggaggcggagcggtacaaatcggaagatgaggcgaatcgcgaccgagtcgcggccaaaaacgccctggagtcctatacctacaacatcaagcagacggtggaagacgagaaactgaggggcaagattagcgagcaggacaaaaacaagatcctcgacaagtgtcaggaggtgatcaactggctcgaccgaaaccagatggcagagaaagatgagtatgaacacaagcagaaagagctcgaaagagtttgcaaccccatcatcagcaaactttaccaaggtggtcctggcggcggcagcggcggcggcggttcaggagcctccgggggacccaccatcgaagaagtggactaagcttgcactcaagtcagcgtaaacctctttgcctttctctctctctctttttttttgtttgtttctttgaaatgtccttgtgccaagtacgagatctattgttggaagtctttggtatatgcaaatgaaaggagaggtgcaacaacttagtttaattataaaagttccaaagtttgttttttaaaaacattattcgaggtttctctttaatgcattttgcgtgtttgctgacttgagcatttttgattagttcgtgcatggagatttgtttgagatgagaaaccttaagtttgcacacctgttctgtagaagcttggaaacagtaaaatatataggagcttaaattgtttatttttatgtactactttaaaactaaactgaacattgcagtaatgttaaggacaggtatactttttgcaaacaaatgcataaatgcaaatgtaaagtaaagctgaaattgatctcaaaaaaaaaaaaaaaaaaaaaaaaaaaaaaaaaaa

SEQ ID NO: 95 - DNA, 4394 bp, Homo sapiens
ccggctcggtacgcgctctgctccgagccgctcactgcgtggtagagtctggtgcccccgccgtcgcctgcatcgccgccaccgccgctccgccacgaccaccgccgcctcctgccctgcagccaccgccaccgcctgtgtcgccgccgcctcgggaccggctgtatgattaggccacaatcttcaatgagtaaacatattcctcaattctgtggtgttcttggtcacacatttatggagtttctgaagggcagtggagattactgccaggcacagcacgacctctatgcagacaagtgaactgtagaaactgattactgctccaccaagaagcccccataagagtggttatcctggacacagaagtgttgaattgaaatccacagagcattttacaagagttctgacctggatggggtaaacctcagtgcacttcttttctgttggcctcagtattactggattgaagaattgctgcttcttgttaggaggttcatttcacttatcattacttacaacttcatactcaaagcactgagaatttcaagtggagtatattgaagtagacttcagtttctttgcatcatttctgtattcaatttttttaattatttcataaccctattgagtgttttttaactaaattaacatggctcgaatgaaccgcccagctcctgtggaagtcacatacaagaacatgagatttcttattacacacaatccaaccaatgcgaccttaaacaaatttatagaggaacttaagaagtatggagttaccacaatagtaagagtatgtgaagcaacttatgacactactcttgtggagaaagaaggtatccatgttcttgattggccttttgatgatggtgcaccaccatccaaccagattgttgatgactggttaagtcttgtgaaaattaagtttcgtgaagaacctggttgttgtattgctgttcattgcgttgcaggccttgggagagctccagtacttgttgccctagcattaattgaaggtggaatgaaatacgaagatgcagtacaattcataagacaaaagcggcgtggagcttttaacagcaagcaacttctgtatttggagaagtatcgtcctaaaatgcggctgcgtttcaaagattccaacggtcatagaaacaactgttgcattcaataaaattggggtgcctaatgctactggaagtggaacttgagatagggcctaatttgttatacatattagccaacatgttggcttagtaagtctaatgaagcttccataggagtattgaaaggcagttttaccaggcctcaagctagacagatttggcaacctctgtatttgggttacagtcaacctatttggatacttggcaaaagattcttgctgtcagcatataaaatgtgcttgtcatttgtatcaattgacctttccccaaatcatgcagtattgagttatgacttgttaaatctattcccatgccagaatcttatcaatacataagaaatttaggaagattaggtgccaaaatacccagcacaatacttgtatatttttagtaccatacagaagtaaaatcccaggaactatgaacactagaccttatgtggtttattccttcaatcatttcaaacattgaaagtagggcctacatggttatttgcctgctcactttatgtttacatctcccacattcataccaatatacgtcaggtttgcttaaccattgatttttttttttttttaccaagtcttacagtgattattttacgtgtttccatgtatctcactttgtgctgtattaaaaaaacctccattttgaaaatctacgttgtacagaagcacatgtctttaatgtcttcagacaaaaaagccttacattaatttaatgtttgcactctgaggtgcaacttaacagggagggcctgagaaaagaatgggagggggctattaattattttttagcaaaatgttgcctttgtcttgtgcaaacatgtagaatatgctctttaatttagtaaaatatttttttaaaaggtagagatgctttgttattgtaatcataaacttcctgaaattcttgtaatttttttcccatacttatcagaagtgtgtttaccaacttatttttgtttgaaagtgtgattttttttttccttcccaacctctcttgcaaaaaaagaaatgggtttctgctaatgaattgagcacatctaatattttatatgccttttggagctgtgtaagttaatatttgatacttgacaatttgttttattatgtaattgataaaatggtgatgtgtattaatgttagttcaaccatatatttatactgtctggggatgtgtggttatagttctgtgggagaaataattttgtcagtgttcaccagcttgtaaaaacttagtgcgagagctgaaacatctaaataaataatgacatgcatttatcatcattgagattggtttgctttaaattaacttattttgtagaagacaaaatgaattgcacttcacttaatgtgtgtcctcatctttttacaaataaatgaaggattataaatgatgtcagcattttagtaaacttttagacaaaatttgttagggtcattcatgaaaactttaatactaaaagcactttccattatatactttttaaaggtctagataattttgaaccaatttattattgtgtactgaggagaaataatgtatagtagaggacagccttggtttgtaaagctcagttccactagttcatggttttgtgcaacttctgagcctcagttttctcctttgcaaattaataattacatacctttatagattttgaaattaatttaaatattagtatttggtacatgaaggcttaatgttaagtttcctttaatgatccacaataatccctttgatcacgttaatctaaatctagatgtctttgtctaattttttttgaatagcagttataaatgtaaaggactcaaagtttaagtaaaaagtgatactccaccttgtgtttcaaagaatttagttccacctcttcataccagtttaacacttaatatatttcattggattttagacagggcaaaaggaagaacaggggcctctggaggcccttggttatttaaatcttggattatttgtgatagtaatcacaaatttttggctaatttttaacctgaggttttgttttttttttaaaggaaatgcagcctagtcttgagaacataattttatataatcaattactaaatgttaaactattaccacacagcccataaaacagcatttgcgtttattgagagagaggatgtgccatcatgattaatgaaaactatcttttgagtttgaaaagaaattaatttgcagtgtttggattgtatatatggtgctaaaaataaattaatttactttataaaccttatctgtacattatacgatgtgatgaaatttgctttttatccaaatattttgtatcttgtaaatatggctaattataggaatgcctataatacatcttagattccttatatctaataagagttcaaagagttatgagttgaagtcttgaatgcaggaaactatctgatagtgttctaaaatttggttacttgggtttggatacccttagtgggatgatgtaaatagaggctagctacctaggcttgtctatagcaaccataatgttgatgtaagtaatgcggttactgaatcataagaaaatgccatctctttttagttgaaggaaaactctggaagtaggtgccattggtcattctgcagtgcactgcaaccattgtttcccctagtgccctcttttccctagggcattgctctcctattcccacgccttaacacagctctatacctagaagcagccagcccaggcatgcagtcacatttaatcacatcccccttctagagtgcttcaaaatgatgtagtccctcaacttggctaaagaatctcaatctcttgaaatttatttttttaatgtcatattcatctggtaaatatctactgtttgccaggcatttaagaatatggcaaagaacataaaagatggtgtcaccagattttggtcaccaatgagtacccgacccgttgccatgattaagagagaatgctttctattggagtttcaggaaatataatttgagaatactttaaagggaagtggaagtataagtgaatgatatttttcttttacatgtaaacaatgaagttatttcaaagttaagttttaaacaaaatacatgaagtagtgtctgccatacatgttaatattctacattcttgcttccttaaattaatatgtttgtgtgtatatatgtgcctcacacctgaattgaaaattaaagactggtttaaaagtggttaaaaaaaaaaaaaaaaaa

SEQ ID NO: 96 - DNA, 1760 bp, Homo sapiens
ggcgaatggctcgtctgtagtgcacgccgcgggcccagctgcgaccccggccccgcccccgggaccccggccatggacgaactgttccccctcatcttcccggcagagccagcccaggcctctggcccctatgtggagatcattgagcagcccaagcagcggggcatgcgcttccgctacaagtgcgaggggcgctccgcgggcagcatcccaggcgagaggagcacagataccaccaagacccaccccaccatcaagatcaatggctacacaggaccagggacagtgcgcatctccctggtcaccaaggaccctcctcaccggcctcacccccacgagcttgtaggaaaggactgccgggatggcttctatgaggctgagctctgcccggaccgctgcatccacagtttccagaacctgggaatccagtgtgtgaagaagcgggacctggagcaggctatcagtcagcgcatccagaccaacaacaaccccttccaagttcctatagaagagcagcgtggggactacgacctgaatgctgtgcggctctgcttccaggtgacagtgcgggacccatcaggcaggcccctccgcctgccgcctgtccttcctcatcccatctttgacaatcgtgcccccaacactgccgagctcaagatctgccgagtgaaccgaaactctggcagctgcctcggtggggatgagatcttcctactgtgtgacaaggtgcagaaagaggacattgaggtgtatttcacgggaccaggctgggaggcccgaggctccttttcgcaagctgatgtgcaccgacaagtggccattgtgttccggacccctccctacgcagaccccagcctgcaggctcctgtgcgtgtctccatgcagctgcggcggccttccgaccgggagctcagtgagcccatggaattccagtacctgccagatacagacgatcgtcaccggattgaggagaaacgtaaaaggacatatgagaccttcaagagcatcatgaagaagagtcctttcagcggacccaccgacccccggcctccacctcgacgcattgctgtgccttcccgcagctcagcttctgtccccaagccagcaccccagccctatccctttacgtcatccctgagcaccatcaactatgatgagtttcccaccatggtgtttccttctgggcagatcagccaggcctcggccttggccccggcccctccccaagtcctgccccaggctccagcccctgcccctgctccagccatggtatcagctctggcccaggccccagcccctgtcccagtcctagccccaggccctcctcaggctgtggccccacctgcccccaagcccacccaggctggggaaggaacgctgtcagaggccctgctgcagctgcagtttgatgatgaagacctgggggccttgcttggcaacagcacagacccagctgtgttcacagacctggcatccgtcgacaactccgagtttcagcagctgctgaaccagggcatacctgtggccccccacacaactgagcccatgctgatggagtaccctgaggctataactcgcctagtgacaggggcccagaggccccccgacccagctcctgctccactgggggccccggggctccccaatggcctcctttcaggagatgaagacttctcctccattgcggacatggacttctcagccctgctgagtcagatcagctcctaagggggtgacgcctgccctccccagagcactgg

SEQ ID NO: 97 - DNA, 2701 bp, Homo sapiens
ccgccgtagcgcgtcttgggtctcccggctgccgctgctgccgccgccgcctcgggtcgtggagccaggagcgacgtcaccgccatggcaggcatcaaagctttgattagtttgtcctttggaggagcaatcggactgatgtttttgatgcttggatgtgcccttccaatatacaacaaatactggcccctctttgttctatttttttacatcctttcacctattccatactgcatagcaagaagattagtggatgatacagatgctatgagtaacgcttgtaaggaacttgccatctttcttacaacgggcattgtcgtgtcagcttttggactccctattgtatttgccagagcacatctgattgagtggggagcttgtgcacttgttctcacaggaaacacagtcatctttgcaactatactaggctttttcttggtctttggaagcaaggacgacttcagctggcagcagtggtgaaaagaaattactgaactattgtcaaatggacttcctgtcatttgttggccattcacgcacacaggagatggggcagttaatgctgaatggtatagcaagcctcttgggggtattttaggtgctcccttctcacttttattgtaagcatactattttcacagagacttgctgaaggattaaaaggattttctcttttggaaaagcttgactgatttcacacttatctatagtatgctttttgtggtgtcctgctgaatttaaatatttatgtgtttttcctgttaggttgattttttttggaatcaatatgcaatgttaaacacttttttaatgtaatcatttgcattggttaggaattcagaattccgccggctctattactggtcaagtacatcttttctcttaaaattatttagcctccattattacaaaaaattataaaaataagttttcagtcagtcaggatgacatcactcccaatgttatgcagacatacagacggttggcatacgttatagactgtatactcagtgcaaatatagctgcatttatacctcagaggggccaagtgttaatgcccatgccctccgttaagggttgttggttttactggtagacagatgttttgtggattgaaaattattttatggaattgctacagaggagtgcttttcttctcaattgttagaagaatttatgttaaactttaaggtaagggtgtaaaaacatttttgagataaggtttttatttatgtttattattgttagagtgagttgcaatgtgggaagaaatgacattgaaattccagtttttgaatcctgtttctatttataagtgaaatttgtgatctcctatcaacctttcatgttttaccctgttaaaatggacatacatggaaccactactgatgagggacagttgtatgtttgcatcatatatgccagaaaaccttcctctgcttcctccttttgacttatttggtatgttgtatatattacataaaataacttttcaaatatagtttaataacacttagaagtgtttacttacctggaaaataattgctatgccgtacattcagagtgccccctcccctgcaaggccttgccatgattaacaagtaacttgttagtcttacagataattcatgcattaacagtttaagatttagaccatggtaatagtagttcttattctctaaggttatatcatatgtaatttaaaagtatttttaagccaagtttcctgtatacctctgaactgttttgattttgagttcatcatgatagatctgctgtttccttataaaaggcatttgttgtgtgagttaatgcaaagtagccaagtccagctatatagcagcttcagaaacatacctgaccaaaaaattcccagtaaccaggcatgatcaatttatagtggtcgtttacatctaataattatcaggacttttttcaggagtgggttataaaaacattcaagttggtctgacagtattttgttaaggatatttgtttgtatgtttattcagtatacttacataaaaattatttcgccatcagccaaaactcagtaatcatgacagctgtctgttgttttatgaagtttatttctcaagaaaatgggaataaatttgggatttgttcagcttttttactaaagatgcctaaagccacaggttttattgcctaacttaagccatgacttttagatatgagatgacgggaagcaggacgaaatatcggcgtgtggctggagccttcccactggaggctgaaagtggcttgtggtattataatgttcagatttcaagaggaaggtgcaggtacacatgagttagagagctggtgagacagttgggaactctttgtgcttgtgatctactggactttttttttgcaggaagtgcattctctggtccttccctattttctgttctggatgtcagtgcagtgcactgctactgttttatccacttggccacagactttttctaacagctgcgtattatttctatatactaattgcattggcagcattgtgtctttgaccttgtatactagcttgacatagtgctgtctctgatttctaggctagttacttgagatatgaattttccatagaatatgcactgatacaacattaccattcttctatggaaagaaaacttttgatgatgaaacaataaagattttaaatatcaaaaaaaaaaaaaaaaaa

SEQ ID NO: 98 - DNA, 884 bp, Homo sapiens
cagggcctgtccgtggccagcatccctgctgggcgattgagcagcgggaagctgcttggacccagtctcaaacttaaccctcatctagcacccgggcaggcctcctgggttgcagggacttgagaaaaggcagagttctcaggtcctaggaagctggggcacgctggcgtgacaagcgtcccggagaaagccaagccctcggggagctggggaccgcagcagggctgcagtcacatcctgcgcgggtgggcggcgggccaggccttcagttgtttcgggacgcgccgagcttcgccgctcttccagcggctccgctgccagagctagcctgagcccggttctggggcgaaaatgcctgcccttcacatcgaagatttgccagagaaggaaaaactgaaaatggaagttgagcagcttcgcaaagaagtgaagttgcagagacaacaagtgtctaaatgttctgaagaaataaagaactatattgaagaacgttctggagaggatcctctagtaaagggaattccagaagacaagaacccctttaaagaaaaaggcagctgtgttatttcataaataacttgggagaaactgcatcctaagtggaagaactagttgttttagttttcccagataaaaccaacatgctttttaaggaaggaagaatgaaattaaaaggagactttcttaagcaccatatagatagggttatgtataaaagcatatgtgctactcatctttgctcactatgcagtcttttttaagagagcagagagtatcagatgtacaattatggaaataagaacattacttgagcatgacacttctttcagtatattgcttgatgcttcaaataaagttttgtcttgggaaaaaaaaaaaaaaaa

SEQ ID NO: 99 - DNA, 2626 bp, Homo sapiens
cgaggacgccaacagcagcggagaaacgtttctctttcctctcagtttgcgcacaccatggcggcccctgcccagcagactactcagcctggcggcgggaagcgcaaaggcaaggctcagtatgtgctggccaagcgcgctcggcgctgcgacgctggcgggccccgtcagctagagcccgggctacagggcatcctcatcacctgcaatatgaacgagcgcaagtgcgtggaggaggcctacagcctcctcaacgaatacggcgacgacatgtatgggccagaaaagtttacagacaaggatcagcagccctctggaagtgagggagaggatgatgatgcggaggctgccttgaagaaagaagttggtgacattaaggcatctacagagatgaggttaagaagattccagtcagtggaaagtggagcaaataacgttgtcttcatcaggacacttgggatagagcctgagaaattggtgcatcatattctccaggatatgtacaaaaccaagaaaaagaagactcgagttattttgcgaatgttacccatctcaggcacatgcaaggcttttttagaagatatgaaaaaatatgcagaaacatttttggaaccctggtttaaagctccaaacaaagggacatttcagattgtgtacaaatctcgaaataacagtcatgtgaatagagaagaagttatcagagaattggcaggaatagtgtgcaccctcaattcagaaaataaagtggatctcaccaatccacagtacacagtggtagtagaaatcatcaaagctgtctgttgcctgagtgttgtgaaagattacatgttgtttagaaaatacaatctccaggaggtggtgaagagccctaaggatccgtcacagcttaactcaaagcagggaaatgggaaagaagctaaactggaatctgcggacaaatcagaccaaaacaacacagcagaaggaaaaaataaccagcaggtaccagagaatactgaggagctggggcagacaaaaccaacgtctaatccacaggtggtaaatgagggaggagccaaacctgaacttgcaagtcaagccacagaaggatccaagtcaaatgaaaatgacttctcataggaagtcatttggtgttggaggtgggtttctcacctggggctctacgagatgttgctggggctccaccttaaattgtgactaaaaacagttttttatttgtgtgctgcattatgctgttctcacagtagtgagcaatgattgcgcagccctgttaacagtttttttagggatctttcagcctttatggtattacgtagaggcagacccatgtgctgctgttgcaaagaggggaggataggagggggatgttggcctctcccaggctcctcttctgcagtgccagctgacttaagggagtgaactacctgtgaagtagaaaatcagagggaagttttcattctaaggaaggagtttttacatgccacagctcagctgtctgcctgccactttgttgtaaacattgcaaaaatgtggatcatgtaggttagaagtgaattgtttagtgaagtttttgtacttttgtgattttcttgtttatgtctgttttttttttttttttttaacatttgtgtgtaatatagctgacagtccagtgtcgcaattttggaaggcaagatgtgagagagacgagaaccattttaggcatagaactacagacatttctgaaaaggttggtgatgaagaacttcagtcttctgagtatacttcagtatactagtgcaacaagggacacaaagaaattctgtcttaataaagaaagctacttctcaagggtattatgtggactcagtccaagctctcctgtcccattgtgcattgtctgtgacatgcaacttacaaaactagcaattgtaacaataaatcacagccacttgacaagaaaggatattcattattttcaaatggcttttggactatcaaaaacagtaaggcttttgttcagaaatcacctttagtcaaaaggtttaagaagcaaattatttagtagcagaacttatctcaggaaaggaaaatatgcatggttggtgagaatctaataacattaaaatgctggggcaagatgcagtacaaagttgaagagactttattctcaataagttgatttactgatgatatgtcatatgatgcaaaaaaggttttgtgtcattaactgaaaagtagcagcttctctatccaggatgatgagtcaacaggtttcactaatatttgtcatgctgtagcatttgtaagatttgtaaatgatgaaattcaaagaaaactttttctattgctaggagcctgccagaacaaaggccaatatataatgttgtgacatcatatctgataaccagaggtctggtatctacactcctggtgccccatcagtggttgtctccataagtcattttgcgttattaaaaaaaaaaaaagaaatcctgatgttgacattatagcacactgctttctccacagagatgctgatatcaaaaacttgaagatacagtgaagttctgaataatgttacaaaactggttacctgtatcaaagacccatttatgcaaaaatgttaaaaaaaaaaaaaaaaaaa

SEQ ID NO: 100 - DNA, 1323 bp, Homo sapiens
gtggcttttaccctggccgggcgggcggggctcagccgggctgggctgggctccgcggctggagccgggctctacccagagcaagaccctgatggctgcggtgtttctggtaacgctttatgaatactcgccgcttttctacatcgcggtggtctttacctgcttcatcgtgaccaccggcctggtattgggatggtttggttgggatgttccagtaattctgagaaattcagaagagacccagttcagcacaagagttttcaaaaagcaaatgagacaagtcaagaatccttttggcttagagatcactaatccatcttcagcttcaattacaactggcataaccttgacaacagattgccttgaagatagcctccttacatgctactgggggtgcagtgttcaaaaattatatgaagctctgcagaagcatgtttattgcttcagaataagcactccccaagcattagaagatgctctgtatagtgaatatctctatcaggaacagtattttattaaaaaggatagcaaagaagaaatatattgccagttaccaagagatactaaaattgaagactttggtacagtacccagatctcgctatccattggtagcgctattgaccttagctgatgaggatgaccgggaaatttatgatattatttccatggtgtcagtgattcatattcctgataggacttataaactatcctgcagaatattgtatcaatatttactcttggctcaaggtcaatttcatgatcttaagcaacttttcatgtctgcaaataataatttcactccctccaacaattcctcttcagaagaaaaaaacacagacagaagtttgttggaaaaggtgggactctctgaaagtgaagttgagccatcggaagagaacagcaaggactgtgttgtttgccagaatgggactgtgaactgggtactcttaccatgcagacacacatgcctgtgtgatggctgtgtgaagtattttcagcagtgcccaatgtgcaggcagtttgttcaggaatcttttgcactttgcagtcaaaaagagcaagataaagacaaaccgaagactctttgaagacatcgtaacactgaaaagtacactttctactaaagatgcagaaattgatgatcttggaattcatcataacatggaatctacagtactgaccatcaatgaaaattatattttaacttcatatttgtatggtacttggatgataaaaattaattattcctttctgcttagtgaatgaatactggaatccatctgtgttgatacataaaaattcattcaactcttgaaaagaa

SEQ ID NO: 101 - DNA, 5748 bp, Homo sapiens
gagaagaaagccagtgcgtctctgggcgcaggggccagtggggctcggaggcacaggcaccccgcgacactccaggttccccgacccacgtccctggcagccccgattatttacagcctcagcagagcacggggcgggggcagaggggcccgcccgggagggctgctacttcttaaaacctctgcgggctgcttagtcacagccccccttgcttgggtgtgtccttcgctcgctccctccctccgtcttaggtcactgttttcaacctcgaataaaaactgcagccaacttccgaggcagcctcattgcccagcggaccccagcctctgccaggttcggtccgccatcctcgtcccgtcctccgccggcccctgccccgcgcccagggatcctccagctcctttcgcccgcgccctccgttcgctccggacaccatggacaagttttggtggcacgcagcctggggactctgcctcgtgccgctgagcctggcgcagatcgatttgaatataacctgccgctttgcaggtgtattccacgtggagaaaaatggtcgctacagcatctctcggacggaggccgctgacctctgcaaggctttcaatagcaccttgcccacaatggcccagatggagaaagctctgagcatcggatttgagacctgcaggtatgggttcatagaagggcacgtggtgattccccggatccaccccaactccatctgtgcagcaaacaacacaggggtgtacatcctcacatccaacacctcccagtatgacacatattgcttcaatgcttcagctccacctgaagaagattgtacatcagtcacagacctgcccaatgcctttgatggaccaattaccataactattgttaaccgtgatggcacccgctatgtccagaaaggagaatacagaacgaatcctgaagacatctaccccagcaaccctactgatgatgacgtgagcagcggctcctccagtgaaaggagcagcacttcaggaggttacatcttttacaccttttctactgtacaccccatcccagacgaagacagtccctggatcaccgacagcacagacagaatccctgctaccactttgatgagcactagtgctacagcaactgagacagcaaccaagaggcaagaaacctgggattggttttcatggttgtttctaccatcagagtcaaagaatcatcttcacacaacaacacaaatggctggtacgtcttcaaataccatctcagcaggctgggagccaaatgaagaaaatgaagatgaaagagacagacacctcagtttttctggatcaggcattgatgatgatgaagattttatctccagcaccatttcaaccacaccacgggcttttgaccacacaaaacagaaccaggactggacccagtggaacccaagccattcaaatccggaagtgctacttcagacaaccacaaggatgactgatgtagacagaaatggcaccactgcttatgaaggaaactggaacccagaagcacaccctcccctcattcaccatgagcatcatgaggaagaagagaccccacattctacaagcacaatccaggcaactcctagtagtacaacggaagaaacagctacccagaaggaacagtggtttggcaacagatggcatgagggatatcgccaaacacccaaagaagactcccattcgacaacagggacagctgcagcctcagctcataccagccatccaatgcaaggaaggacaacaccaagcccagaggacagttcctggactgatttcttcaacccaatctcacaccccatgggacgaggtcatcaagcaggaagaaggatggatatggactccagtcatagtataacgcttcagcctactgcaaatccaaacacaggtttggtggaagatttggacaggacaggacctctttcaatgacaacgcagcagagtaattctcagagcttctctacatcacatgaaggcttggaagaagataaagaccatccaacaacttctactctgacatcaagcaataggaatgatgtcacaggtggaagaagagacccaaatcattctgaaggctcaactactttactggaaggttatacctctcattacccacacacgaaggaaagcaggaccttcatcccagtgacctcagctaagactgggtcctttggagttactgcagttactgttggagattccaactctaatgtcaatcgttccttatcaggagaccaagacacattccaccccagtggggggtcccataccactcatggatctgaatcagatggacactcacatgggagtcaagaaggtggagcaaacacaacctctggtcctataaggacaccccaaattccagaatggctgatcatcttggcatccctcttggccttggctttgattcttgcagtttgcattgcagtcaacagtcgaagaaggtgtgggcagaagaaaaagctagtgatcaacagtggcaatggagctgtggaggacagaaagccaagtggactcaacggagaggccagcaagtctcaggaaatggtgcatttggtgaacaaggagtcgtcagaaactccagaccagtttatgacagctgatgagacaaggaacctgcagaatgtggacatgaagattggggtgtaacacctacaccattatcttggaaagaaacaaccgttggaaacataaccattacagggagctgggacacttaacagatgcaatgtgctactgattgtttcattgcgaatcttttttagcataaaattttctactctttttgttttttgtgttttgttctttaaagtcaggtccaatttgtaaaaacagcattgctttctgaaattagggcccaattaataatcagcaagaatttgatcgttccagttcccacttggaggcctttcatccctcgggtgtgctatggatggcttctaacaaaaactacacatatgtattcctgatcgccaacctttcccccaccagctaaggacatttcccagggttaatagggcctggtccctgggaggaaatttgaatgggtccattttgcccttccatagcctaatccctgggcattgctttccactgaggttgggggttggggtgtactagttacacatcttcaacagaccccctctagaaatttttcagatgcttctgggagacacccaaagggtgaagctatttatctgtagtaaactatttatctgtgtttttgaaatattaaaccctggatcagtcctttgatcagtataattttttaaagttactttgtcagaggcacaaaagggtttaaactgattcataataaatatctgtacttcttcgatcttcaccttttgtgctgtgattcttcagtttctaaaccagcactgtctgggtccctacaatgtatcaggaagagctgagaatggtaaggagactcttctaagtcttcatctcagagaccctgagttcccactcagacccactcagccaaatctcatggaagaccaaggagggcagcactgtttttgttttttgttttttgttttttttttttgacactgtccaaaggttttccatcctgtcctggaatcagagttggaagctgaggagcttcagcctcttttatggtttaatggccacctgttctctcctgtgaaaggctttgcaaagtcacattaagtttgcatgacctgttatccctggggccctatttcatagaggctggccctattagtgatttccaaaaacaatatggaagtgccttttgatgtcttacaataagagaagaagccaatggaaatgaaagagattggcaaaggggaaggatgatgccatgtagatcctgtttgacatttttatggctgtatttgtaaacttaaacacaccagtgtctgttcttgatgcagttgctatttaggatgagttaagtgcctggggagtccctcaaaaggttaaagggattcccatcattggaatcttatcaccagataggcaagtttatgaccaaacaagagagtactggctttatcctctaacctcatattttctcccacttggcaagtcctttgtggcatttattcatcagtcagggtgtccgattggtcctagaacttccaaaggctgcttgtcatagaagccattgcatctataaagcaacggctcctgttaaatggtatctcctttctgaggctcctactaaaagtcatttgttacctaaacttatgtgcttaacaggcaatgcttctcagaccacaaagcagaaagaagaagaaaagctcctgactaaatcagggctgggcttagacagagttgatctgtagaatatctttaaaggagagatgtcaactttctgcactattcccagcctctgctcctccctgtctaccctctcccctccctctctccctccacttcaccccacaatcttgaaaaacttcctttctcttctgtgaacatcattggccagatccattttcagtggtctggatttctttttattttcttttcaacttgaaagaaactggacattaggccactatgtgttgttactgccactagtgttcaagtgcctcttgttttcccagagatttcctgggtctgccagaggcccagacaggctcactcaagctctttaactgaaaagcaacaagccactccaggacaaggttcaaaatggttacaacagcctctacctgtcgccccagggagaaaggggtagtgatacaagtctcatagccagagatggttttccactccttctagatattcccaaaaagaggctgagacaggaggttattttcaattttattttggaattaaatacttttttccctttattactgttgtagtccctcacttggatatacctctgttttcacgatagaaataagggaggtctagagcttctattccttggccattgtcaacggagagctggccaagtcttcacaaacccttgcaacattgcctgaagtttatggaataagatgtattctcactcccttgatctcaagggcgtaactctggaagcacagcttgactacacgtcatttttaccaatgattttcaggtgacctgggctaagtcatttaaactgggtctttataaaagtaaaaggccaacatttaattattttgcaaagcaacctaagagctaaagatgtaatttttcttgcaattgtaaatcttttgtgtctcctgaagacttcccttaaaattagctctgagtgaaaaatcaaaagagacaaaagacatcttcgaatccatatttcaagcctggtagaattggcttttctagcagaacctttccaaaagttttatattgagattcataacaacaccaagaattgattttgtagccaacattcattcaatactgttatatcagaggagtaggagagaggaaacatttgacttatctggaaaagcaaaatgtacttaagaataagaataacatggtccattcacctttatgttatagatatgtctttgtgtaaatcatttgttttgagttttcaaagaatagcccattgttcattcttgtgctgtacaatgaccactgttattgttactttgacttttcagagcacacccttcctctggtttttgtatatttattgatggatcaataataatgaggaaagcatgatatgtatattgctgagttgaaagcacttattggaaaatattaaaaggctaacattaaaagactaaaggaaacagaaaaaaaaaaaaaaaaa

SEQ ID NO: 102 - DNA, 2425 bp, Homo sapiens
gcggccgccggtcctccctccacctcctcctcggccccccctcgcttccctcctcccacttcccgagctccggcgtcgtcccggccacgctcgacgctgctgcaggaacaaaggaagaccccgcggcggcggcggcgccacctccgcctgctgctccgacccgctcccggcccgcggcggcggcaccagggcgcccggctcagccttcccggaggcctcggcccggcctcatcgtgccggcttcgcgcgcgaacccggctttcgcatttgggaccctgcaggaaaaatatggctcaggagactaaccagaccccggggcccatgctgtgtagcacaggatgtggcttttatggaaatcctaggacaaatggaatgtgttcagtttgctacaaagaacatcttcagaggcagcaaaatagtggcagaatgagcccaatggggacagctagtggttccaacagtcctacctcagattctgcatctgtacagagagcagacactagcttaaacaactgtgaaggtgctgctggcagcacatctgaaaaatcaagaaatgtgcctgtggctgccttgcctgtaactcagcaaatgacagaaatgagcatttcaagagaggacaaaataactaccccgaaaacagaggtgtcagagccagttgtcactcagcccagtccatcagtttctcagcccagtacttctcagagtgaagaaaaagctcctgaattgcccaaaccaaagaaaaacagatgtttcatgtgcagaaagaaagttggtcttacagggtttgactgccgatgtggaaatttgttttgtggacttcaccgttactctgacaagcacaactgtccgtatgattacaaagcagaagctgcagcaaaaatcagaaaagagaatccagttgttgtggctgaaaaaattcagagaatataaattacttcttgtgaagagactgaaactttgtttttattttaatatatcgtaggaaaacattaaagagcagatgcatggccatttttctttgatgttctccagagttttacattacacttgtctgtcttataattgatattttaggatgtttgggtgtttgttacaggcagaattggatagatacagccctacaaatgtatatgccctcccctgaaaaaaattggatgaaaatctgcacagcaaagtgaaacacacagataataggaacaaaatgtagttcccatgtgccaaacaaaataaatgaaatctctgcatgtttgcagcatatctgccttttgggaatgtaatcaaggtataatctttggctagtgttatgtgcctgtatttttttaaaatggtacaccagaaaaggactggcagtctacttctaccatagttaaacttcaccctctttaatttcacaacatattctttggaagcaggaagaaatgctcataaagaggatcagaccttctttcccgtgaaaccagtatttggcgccatatataagcctggttaaattggtcatctaaagctgtcaaataagacattctgtgaaaggtaaacatcgaaactggttataagtaaaaccatcaagccaacaacagggtcttgagataacctttgaagcttattgtactggcctgcaccagaagatgtctgcattactcattgctaaaaatgtgtagcacagaactgcactaggattaatttgtttacaagaagaaatttaaactctacgtttggttttcacatacagcagctctattgaataacatgcatctgaattttaagttgcaaaggtatctgaataatttttcatgtgcatcttttgtcgaatgttttggttcaagaaagaatgtttaaagctttttaaaagacttcagttcttaatgtaactgtacccttctgcatggaaaatcataaccaacatggctgcagtagacttcttagtggtatccagcgccacttgcagagggctgctttatcatattgtacttgggtgtaggactctagtgttcttgggtgtattgcatgggctgcattatctacagcattgtacaataacaactagaaaaggcagtatacttcactgatgcttgtctggtaataatcacttctgtgttataatggaaggttttttgtgatgtatgaaacttgtgttttttatatataaatgagtatagttagtgttgtggtaatgcctgttttcatctgtaaatagttaagtatgtacacgaggcactacttctgatttattgcaatgttcagtcctagtttttacttttattcttaaagcattcagttttgctttcaattttatgtaccttagttctgagttagacctgcagatgtgtacagatagttcatatttatgtattgcacataatcatgctattcagcattgatgctatattgtattatgtaaataataaaagccatgtacagagggaaa

SEQ ID NO: 103 - DNA, 4139 bp, Homo sapiens
gcgcagtgccggccggggcggggatacgccgtgtgcgcggccgggggcggaacggaggaggaggcggtggtgtcccggctgcggggtaggagtccgcggcagcctccgggtaagccaagcgccgcgcagtgctgagttcccgcacgccgcagagccatggagatcggcaccgagatcagccgcaagatccggagtgccattaaggggaaattacaagaattaggagcttatgttgatgaagaacttcctgattacattatggtgatggtggccaacaagaaaagtcaggaccaaatgacagaggatctgtccctgtttctagggaacaacacaattcgattcaccgtatggcttcatggtgtattagataaacttcgctctgttacaactgaaccctctagtctgaagtcttctgataccaacatctttgatagtaacgtgccttcaaacaagagcaatttcagtcggggagatgagaggaggcatgaagctgcagtgccaccacttgccattcctagcgcgagacctgaaaaaagagattccagagtttctacaagttcgcaggagtcaaaaaccacaaatgtcagacagacttacgatgatggagctgcaacccgactaatgtcaacagtgaaacctttgagggagccagcaccctctgaagatgtgattgatattaagccagaaccagatgatctcattgacgaagacctcaactttgtgcaggagaatcccttatctcagaaaaaacctacagtgacacttacatatggttcttctcgcccttctattgaaatttatcgaccacctgcaagtagaaatgcagatagtggtgttcatttaaacaggttgcaatttcaacagcagcagaatagtattcatgctgccaagcagcttgatatgcagagtagttgggtatatgaaacaggacgtttgtgtgaaccagaggtgcttaacagcttagaagaaacgtatagtccgttctttagaaacaactcggagaaaatgagtatggaggatgaaaactttcggaagagaaagttgcctgtggtaagttcagttgttaaagtaaaaaaattcaatcatgatggagaagaggaggaagaagatgatgattacgggtctcgaacaggaagcatctccagcagtgtgtctgtgcctgcaaagcctgaaaggagaccttctcttccaccttctaaacaagctaacaagaatctgattttgaaggctatatctgaagctcaagaatccgtaacaaaaacaactaactactctacagttccacagaaacagacacttccagttgctcccagaactcgaacttctcaagaagaattgctagcagaagtggtccagggacaaagtaggacccccagaataagtccccccattaaagaagaggaaacaaaaggagattctgtagaaaaaaatcaaggaactcaacagaggcaattattatcccgactgcaaatcgacccagtaatggcagaaactctgcagatgagtcaagattactatgacatggaatccatggtccatgcagacacaagatcatttattctgaagaagccaaagctgtctgaggaagtagtagtggcaccaaaccaagagtcggggatgaagactgcagattcccttcgggtactttcaggacaccttatgcagacacgagatcttgtacaaccagataaacctgcaagtcccaagtttatagtgacgctggatggtgtccccagccccccaggatacatgtcagatcaagaggaggacatgtgctttgaaggaatgaaacccgtaaaccaaactgcagcctcaaacaagggactcagaggtctcctccacccacagcagttgcacttgctgagcaggcagcttgaggacccaaatggtagcttttctaacgctgagatgagtgaactgagtgtggcacagaaaccagaaaaacttttggagcgctgcaagtactggcctgcttgtaaaaatggggatgagtgtgcctaccatcaccccatctcaccctgcaaagccttccccaattgtaaatttgctgaaaaatgtttgtttgttcacccaaattgtaaatatgatgcaaagtgtactaaaccagattgtcccttcactcatgtgagtagaagaattccagtactgtctccaaaaccagcagttgcaccaccagcaccaccttccagtagtcagctctgccgttacttccctgcttgtaagaagatggaatgtcccttctatcatccaaaacattgtaggtttaacactcaatgtacaagaccggactgcacattctaccatcccaccattaatgtcccaccacgacatgccttgaaatggattcgacctcaaaccagcgaatagcacccagtcctgcctggcagaagatcatgcagtttggaagttttcatgtactgatgaaagatactctacagaacttgtcaaatctttgaaacttggaatatattgctttcataatatgaagttttattgcctatctatctgaagtgtctaatttttcaagtttgtaagtttattatgtggttttaacattgggtgtttttgttttgtttttactatgaaaagacagcttaaggaagagctaaattctgttaaaatatttggggcatgtttgtgcactgctgttgtgaggatcagcatatgaaattgacatcatggttagtcatggtactgcagcttagggggctacacggttgctgtgtgagtggagagatgcagtgaggcagttgtcattattctaaaaattgtactactttcacttttcccaaagattatataatgttcataatccaccatgaaaacagcattggccaaaggtactgaggctgcttaaaatattcaattctgctttttaatttttaagtgaatttagtttgaaaagcatgattatacaggcctctcaggctgagtgctactttggtaaagttcccagttttcctgccttctgtgacaggatgaatgaggtgggtatggacagtggaggcagctggaatggcaagtgcagaaaataggaacagttctatacagtgctctcatttactaataacataatgccttctaaataatttttttgggaaactacattatcacaaaattatacaaatttttttacaagtatttacatactgtatctgaaaacagactttaaagtcacaagattataaatgtacatatatattctcacattctgaaaaataacattctcagaatccacagaaaatatacttagttactactgaagataatttttgaaatgtaaaaattagatttaaatagtatattttaaatgacagaactataattacagagatcagatcagataggtaaactgcaagatagataggatgaaacttttggcctactgtattacttacagagtttttttgtgtgtggtttttaaaactgttaaggcaagaagtgtcaaatgctttagagttaaataacagatcactgatttcaaagacttggtgtatagtgttaaaaattaaagcttaaaaggtggttagaaaagtggattaatgcaaaaggggtaataaagactgcaacattctcaggaccaaattaaactgctaaaaaaaaaaaaaaagttcattgacttgcttagtcgtatactcaaatgatgataaacctacatgtgcaaaggctcacgtttaagattgtcaagccagcagtctactgttgtgttgccattgcttttccattgggagaagaaagaattaaccagtcattaaaccatttggtaagttgcactttgctgtgctgatcccacaggaaaggcttgaaacacgagaagcagcaaagacagagcacacaagtgcataaggctgttgtcttcggcttgggtgaaatgacagttcctcttcattctaaaggtttactccattgaatttaaggcatttgttcattccagtgttgagatgctttgcatctctgcagaagaaatttattttaaattgtttaaatatctggaaatacttttagctatcatttataaagatagttttgttctcagtttcactataaattatagaacaaatgggaaacaagggtttaatttagttcagccattttacaaggaaataataaaatactaaaatctgaaaaaaaaaaaaaaa

SEQ ID NO: 104 - DNA, 2136 bp, Homo sapiens
gggaagaggcggagaacaatatggcggatggcgaggagccggagaagaaaagaaggagaatagaggagctgctggctgagaaaatggctgttgatggtgggtgtggggacactggagactgggaaggtcgctggaaccatgtaaagaagttcctcgagcgatctggacccttcacacaccctgatttcgaaccgagcactgaatctctccagttcttgttagatacatgtaaagttctagtcattggagctggcggcttaggatgtgagctcctgaaaaatctggccttgtctggttttagacagattcatgttatagatatggacactatagatgtttccaatctaaataggcagtttttatttaggcctaaagatattggaagacctaaggctgaagttgctgcagaatttctaaatgacagagttcctaattgcaatgtagttccacatttcaacaagattcaagattttaacgacactttctatcgacaatttcatattattgtatgtggactggactctatcatcgccagaagatggataaatggcatgctgatatctcttctaaattatgaagatggtgtcttagatccaagctccattgtccctttgatagatggggggacagaaggttttaaaggaaatgcccgggtgattctgcctggaatgactgcttgtatcgaatgcacgctggaactttatccaccacaggttaattttcccatgtgcaccattgcatctatgcccaggctaccagaacactgtattgagtatgtaaggatgttgcagtggcctaaggagcagccttttggagaaggggttccattagatggagatgatcctgaacatatacaatggattttccaaaaatccctagagagagcatcacaatataatattaggggtgttacgtataggctcactcaaggggtagtaaaaagaatcattcctgcagtagcttccacaaatgcagtcattgcagctgtgtgtgccactgaggtttttaaaatagccacaagtgcatacattcccttgaataattacttggtgtttaatgatgtagatgggctgtatacatacacatttgaagcagaaagaaaggaaaactgcccagcttgtagccagcttcctcaaaatattcagttttctccatcagctaaactacaggaggttttggattatctaaccaatagtgcttctctgcaaatgaaatctccagccatcacagccaccctagagggaaaaaatagaacactttacttacagtcggtaacctctattgaagaacgaacaaggccaaatctctccaaaacattgaaagaattggggcttgttgatggacaagaactggcggttgctgatgtcaccaccccacagactgtactattcaaacttcattttacttcttaaggaaaatctccacataatagaaaactcatggaaataatatactttgtggatgctaagaagttgaatcgatgtcatttttagcaatagtgttgccacgatttgtctttttttatataatgaaccactcttttttaactttgtaaccttcccttgaagacagaattttggtgttggtgcttgtaagcattttcattaataatatgagaaatgatacctggagagagagattatgagcaaatgtattgcttcttttagaggaggaagcatacaacctcttttgtgtgaattttgttattatggtcaaagaatgcattcctaagttttcatttgagtacccaaatacacaaaaggtgtccctttaaggaaaataaagaattaagttttaaataacattacattttacaatctgacatctggagtatattgaacataggctatttcttgatataacactcatttaattgtggccatccaaatgaatattattgcagaatttatcttgttcataatgatttgtaaatggtgttatagctgaatacctgtgcatgaaaatgggcaatattttcatctgtttacttgtagtgccatagaggccaatatgcacaatattaactaatgccaagacatggctgtttaaaaaatttaatgttcaaacagttatcactgatgcttttgcactatttattaataaaatcatatattgtgtaaaaaaaaaaaaaaaaaa

SEQ ID NO: 105 - DNA, 2367 bp, Homo sapiens
aataggaaagctgcaaaacactgtggagtgctcccgtgtaaataaaaagaggaaaaaagtttctcaagtcgccgctgcacgacgtctggccggcgctggagcgggggtctgcgctctcccgagcggccgcgcgctggactttattgtgccgcaaccagccccagttcccattgtttgtgtttttttcaaaatatggcaaaggttcaggtgaacaatgtagtggtgctggataacccttctcctttctacaacccgttccagttcgagatcaccttcgagtgcatcgaggacctgtctgaagacttggaatggaaaattatctatgtgggctctgcagaaagtgaagaatacgatcaagttttagactctgttttagtgggtcctgttcccgcaggaaggcatatgtttgtatttcaggctgatgcacctaatccaggactcattccagatgcagatgcagtaggcgtaactgttgtgctaattacttgtacctatcgaggacaagaatttattagagttggctattatgtaaataatgaatatactgagacagaattaagggaaaatccaccagtaaaaccagacttttctaagcttcaaaggaatattttggcatctaatcccagggtcacaagattccacattaattgggaagataacacagaaaaactggaagatgcagagagcagtaatccaaatctacagtcacttctttcaacagatgcattaccttcagcatcaaagggatggtccacatcagaaaactcactaaatgtcatgttagaatcccacatggactgcatgtgaccacctaccatccctttagtacaaattaagctattaaaaatacacagaactatttccctgaattccgtaagtacatagtcaaaacacaatgtgaagaatttgtttaaaaacatcctgtagaaagtttataagaaaaccagtatttgaacaaattgtggaatataaatacaactatttttaagtaatttttttctctaatgtgttattttatttgttctgaaactaatctgattaaagcatatatattattttcttctcctttatatgtaatgaaagcacttataaagaaacaggaatcattagaccaggttgtaaagatgtcttggcctcccagacagtctttggaccactattttactggcctttgaaagaacaaagtttacttcaactaaaatgtttcttcctgtgaagacatatggtatcattttaatttaaggggcagatttccattcttttttggcatgtccttaaaaagaggatttgaaatcaactatatgctaccaagaactttaggatccaattttccaagccaccgtgaagcctcttatggctactattatagttcatgagatgttggacagcatttggtttgtttggtaagagaagaacaaatatggctaattgttaataaggtcccctggctatggtttttgttcttataacagagtttagaatatcagagcatttcttgaatcatacatcattattgtccagtgaattcaagaccgaatacaatatcgggagaaaatacaaactccctgtgtttaagaataggggattataatggctcaaattggttcatttgatttctaaaaataccatgacctttaaaaattcttttaatagatcatgttattggcagtatttatataaaaaccatggatttagaaaggtatatttagctttattataatagatacgttactattttggaaatatatatattttcacacctgtagtactcttccccatttcctctgacactcatgcagaatgagatcaggcatatttgtggttgacatactctagatagcttttccaacaaatctttgaaaagcaatcttggaaaggaattcattaactaaatggggtaaaaggtttctttttctttgagagttaagtccttcctcaaaaaattttcttatgctccataaaattgaggtagaatactttcattattcttgcagctaagcaagacagccatatgatgcaggttatgcagtgccttcatatctaaaacttttatactgcactttttaaagcttttatgttgaggaaaggaaaagggcatttgtctaaacatggattctgagttgtatatatttcctatcattctaaaaaagtgaatttgtgaagcaaagttttgccagatgttaaactttgaatttaatataccagattattaaaatattgtccattaactagttcatagattttaaaagtaaaatacttctgactgttaaaactatataaagaaaatctcatttgtctaattgcaattaaaagaaaaatgttaaaatattaaaatgaaaataaaagcattactttccaaaaaaaaaa

SEQ ID NO: 106 - DNA, 2044 bp, Homo sapiens
ccggtcggatgccggaccgggggcaccgctgaggcggtgggtccccgacctgcgagacaggtttggaagcccccgctgcgcccagtccgtgcggaccgcgaggccgcgggcgggtggaggcgcgtctccggcacgatgaaggatttgggggcagagcacttggcaggtcatgaaggggtccaacttctcgggttgttgaacgtctacctggaacaagaagagagattccaacctcgagaaaaagggctgagtttgattgaggctaccccggagaatgataacactttgtgtccaggattgagaaatgccaaagttgaagatttaaggagtttagccaacttttttggatcttgcactgaaacttttgtcctggctgtcaatattttggacaggttcttggctcttatgaaggtgaaacctaaacatttgtcttgcattggagtctgttcttttttgctggctgctagaatagttgaagaagactgcaatattccatccactcatgatgtgatccggattagtcagtgtaaatgtactgcttctgacataaaacggatggaaaaaataatttcagaaaaattgcactatgaattggaagctactactgccttaaactttttgcacttataccatactattatactttgtcatacttcagaaaggaaagaaatactgagccttgataaactagaagctcagctgaaagcttgcaactgccgactcatcttttcaaaagcaaaaccatctgtattagccttgtgccttctcaatttggaagtggaaactttgaaatctgttgaattactggaaattctcttgctagttaaaaaacattccaagattaatgacactgagttcttctactggagagagttggtttctaaatgcctagccgagtattcttctcctgaatgttgcaaaccagatcttaagaagttggtttggatcgtttcaaggcgcacagcccagaacctccacaacagctactatagtgttcctgagctgccaacgatacctgaggggggttgttttgatgaaagtgaaagtgaggactcttgtgaagatatgagttgtggagaggagagtctcagcagctctcctcccagtgatcaagagtgcaccttctttttcaacttcaaagtggcacaaacactgtgctttccatcttagaaatctgattgttctgtcagaatttatatttacagggtttcaaagcaataaatgggggaataggtagtttcctggtttagcccccatctagtcaggaattaatatactggaatacctaccttctatttgttattcagatcagatctggcctattttcatatttatcctaagccatcaaatggggtagtgcctcttaaaccattaacagtactttagacattggcactttatttttctcgtagatctttagctactttggggaggagggaaggtgctgataccttcaatttgttacttttcaagatttttaaaaataactagtgtagcttatcttaaacattttataaaaccttcagatgtctttaagcagattggaagtatgcaagtgcttccttagcagggacagtggataatccttaatggtttatcatagatttcaccctccccccttctcagaagagtgagtatgctcttaaatgtcaaacacatttttgttgttttgttttttaaatgatcagtgtctatttgatgtgatgcagatcttataaatttgggaattataatattgacatttctgtgatttttatatatgtaatgtcttaattgagatttgtgttaaggcagaaataattaggctagggctcttagttttcattcctattgccccaagtattgtcaaactatggtattattttaatgttactttaaaaatccataatctgctagttttgcatgtacttatatgaaaacagtgcagtaagttgaaaactcagtatctatggaattgataaatgttgatctggtgtagtatattttatccgcattttcttatattaaaaaatgttctgcatgattacattttatttgcctttgt

SEQ ID NO: 107 - DNA, 1471 bp, Homo sapiens
atcacacaggatccggagctggtgctgataacagcggaatcccccgtctacctctctccttggtcctggaacagcgctactgatcaccaagtagccacaaaatataataaaccctcagcacttgctcagtagttttgtgaaagtctcaagtaaaagagacacaaacaaaaaattctttttcgtgaagaactccaaaaataaaattctctagagataaaaaaaaaaaaaaaaggaaaatgccagctgatataatggagaaaaattcctcgtccccggtggctgctaccccagccagtgtcaacacgacaccggataaaccaaagacagcatctgagcacagaaagtcatcaaagcctattatggagaaaagacgaagagcaagaataaatgaaagtctgagccagctgaaaacactgattttggatgctctgaagaaagatagctcgcggcattccaagctggagaaggcggacattctggaaatgacagtgaagcacctccggaacctgcagcgggcgcagatgacggctgcgctgagcacagacccaagtgtgctggggaagtaccgagccggcttcagcgagtgcatgaacgaggtgacccgcttcctgtccacgtgcgagggcgttaataccgaggtgcgcactcggctgctcggccacctggccaactgcatgacccagatcaatgccatgacctaccccgggcagccgcaccccgccttgcaggcgccgccaccgcccccaccgggacccggcggcccccagcacgcgccgttcgcgccgccgccgccactcgtgcccatccccgggggcgcggcgccccctcccggcggcgccccctgcaagctgggcagccaggctggagaggcggctaaggtgtttggaggcttccaggtggtaccggctcccgatggccagtttgctttcctcattcccaacggggccttcgcgcacagcggccctgtcatccccgtctacaccagcaacagcggcacctccgtgggccccaacgcagtgtcaccttccagcggcccctcgcttacggcggactccatgtggaggccgtggcggaactgagggggctcaggccacccctcctcctaaactccccaacccacctctcttccctccggactctaaacaggaacttgaatactgggagagaagaggacttttttgattaagtggttactttgtgtttttttaatttctaagaagttactttttgtagagagagctgtattaagtgactgaccatgcactatatttgtatatattttatatgttcatattggattgcgcctttgtattataaaagctcagatgacatttcgttttttacacgagatttcttttttatgtgatgccaaagatgtttgaaaatgctcttaaaatatcttcctttggggaagtttatttgagaaaatataataaaagaaaaaagtaaaggcaaaaaaaaaaaaaaaaaa

SEQ ID NO: 108 - DNA, 3866 bp, Homo sapiens
gcgagtgttgaaagtcggtggcgtaggtcgtcgtcctggatgctggcgagatagatgttatcttccagaggaagaggaggaggcggcgaagcgttttcccagcctcagtctctctttcgttttccttttcccttcccccaaccctccgcccttctctaaatcagccggccttccttgacctcagtgacccgtctggccccgcccaccctcgtcgacgtgattcccgccgtgaggtaagcgccggtggaacctagagccccgcggaagagcagaacgtttgggagtgtgcagctcctgggcccggctcaggcccgtcgcggaggcgcggcgcaggggagcgctcgggtgggagtctcgctcctccaccagtttattgcgacgtagcatccaggcctaggcctccccgtccatccccgccggactcgggcctctggcagcagcgggtgacgcagacggaacatcatgtcgtccgcggccgagcctccgccacccccgcctcccgagagcgcgccttccaagcccgcagcctcgatcgccagcggcgggagcaacagcagcaacaaaggcggccccgaaggcgtcgcggcgcaggcggttgcgtctgcggtcagcgctggtcccgcagacgccgagatggaggaaatatttgatgatgcgtcacctggaaagcaaaaggaaatccaagaaccagatcctacctatgaagaaaaaatgcaaactgaccgggcaaatagattcgagtatttattaaagcagacagaactttttgcacatttcattcaacctgctgctcagaagactccaacttcacctttgaagatgaaaccagggcgcccacgaataaaaaaagatgagaagcagaacttactatccgttggcgattaccgacaccgtagaacagagcaagaggaggatgaagagctattaacagaaagctccaaagcaaccaatgtttgcactcgatttgaagactctccatcgtatgtaaaatggggtaaactgagagattatcaggtccgaggattaaactggctcatttctttgtatgagaatggcatcaatggtatccttgcagatgaaatgggcctaggaaagactcttcaaacaatttctcttcttgggtacatgaaacattatagaaacattcctgggcctcatatggttttggttcctaagtctacattacacaactggatgagtgaattcaagagatgggtaccaacacttagatctgtttgtttgataggagataaagaacaaagagctgcttttgtcagagacgttttattaccgggagaatgggatgtatgtgtaacatcttatgaaatgcttattaaagagaagtctgtgttcaaaaaatttaattggagatacttagtaatagatgaagctcacaggatcaaaaatgaaaaatctaagttgtcagaaatagtgagggaattcaagactacaaatagactattattaactggaacacctcttcagaacaacttgcatgagctgtggtcacttcttaactttctgttgccagatgtgtttaattcagcagatgactttgattcctggtttgatacaaacaactgccttggggatcaaaaactagttgagaggcttcatatggttttgcgtccattcctccttcgtcgaattaaggctgatgttgaaaagagtttgcctccaaagaaggaagtaaaaatctatgtgggcctcagcaaaatgcaaagggaatggtatactcggatattaatgaaggatatagatatactcaactcagcaggcaagatggacaaaatgaggttattgaacatcctaatgcagttgagaaaatgttgtaatcatccatatctctttgatggagcagaacctggtccaccttatacaacagatatgcatctagtaaccaacagtggcaaaatggtggttttagacaagctgctccctaagttaaaagaacaaggttcacgagtactaatcttcagtcaaatgacaagggtattggacattttggaagattattgcatgtggagaaattatgagtactgcaggttggatggtcagacaccccatgatgagagacaagactccatcaatgcatacaatgaaccaaacagcacaaagtttgttttcatgttaagcacgcgtgctggtggtcttggcatcaatcttgcgactgctgatgtagtaattttgtatgattctgattggaatccccaagtagatcttcaggctatggaccgagcacatagaattgggcagactaagacagtcagagtgttccgctttataactgataacactgtagaagaaagaatagtagaacgtgctgagatgaaactcagactggattcaatagtcattcaacaagggaggcttgtggatcagaatctgaacaaaattgggaaagatgaaatgcttcaaatgattagacatggagcaacacatgtgtttgcttcaaaggaaagtgagatcactgatgaagatatcgatggtattttggaaagaggtgcaaagaagactgcagagatgaatgaaaagctctccaagatgggcgaaagttcacttagaaactttacaatggatacagagtcaagtgtttataacttcgaaggagaagactatagagaaaaacaaaagattgcattcacagagtggattgaaccacctaaacgagaaagaaaagccaactatgccgttgatgcatatttcagggaagctcttcgtgttagtgaacctaaagcacccaaggctcctcgacctccaaaacaacccaatgttcaggatttccagttctttcctccacgtttatttgaattactggaaaaagaaattctgttttacagaaaaactattgggtacaaggtacctcgaaatcctgagctgcctaacgcagcacaggcacaaaaagaagaacagcttaaaattgatgaagctgaatcccttaatgatgaagagttagaggaaaaagagaagcttctaacacagggatttaccaattggaataagagagattttaaccagtttatcaaagctaatgagaagtggggtcgtgatgatattgaaaatatagcaagagaagtagaaggcaaaactccagaagaagtcattgaatattcagctgtgttttgggaaaggtgcaacgagctccaggacatagagaagattatggctcagattgaaaggggagaggcgagaattcaaagaagaataagcatcaagaaagcacttgacacaaagattggacggtacaaagcaccttttcatcagctgagaatatcatatggtactaacaaaggaaaaaactatactgaagaagaagatcgttttctgatttgtatgcttcacaaacttggatttgacaaagaaaatgtttatgatgaattgcgacagtgtattcgcaactctcctcagttcagatttgactggtttcttaagtccagaactgcaatggagctccagaggagatgtaataccttaattactttgattgaaagagaaaacatggaactagaagaaaaggagaaggcagagaaaaagaaacgaggaccaaagccttcaacacagaaacgtaaaatggatggcgcacctgatggtcgaggaagaaaaaagaagctgaaactatgaatatgtttttgtttcataatcactaactttaaaccagtagttctttaatttacgggtcttcataagatgtactgtacaatgctcaattgttatgtcatttaaagacatcaggttcatctgtttactgagctagaaacatagtatgtagtttcacttttttaaatgcaacagctgtgctgaaatttttttatcattaacacttgaagtaataaaataggcttcatttattaaaaaaaaaaaaaaaa

SEQ ID NO: 109 - DNA, 661 bp, Homo sapiens
agagacttcctcttcgttaagtcggccttcccaacatggcgcagtctattaacatcacggagctgaatctgccgcagctagaaatgctcaagaaccagctggaccaggaagtggagttcttgtccacgtccattgctcagctcaaagtggtacagaccaagtatgtggaagccaaggactgtctgaacgtgctgaacaagagcaacgaggggaaagaattactcgtcccactgacgagttctatgtatgtccctgggaagctgcatgatgtggaacacgtgctcatcgatgtgggaactgggtactatgtagagaagacagctgaggatgccaaggacttcttcaagaggaagatagattttctaaccaagcagatggagaaaatccaaccagctcttcaggagaagcacgccatgaaacaggccgtcatggaaatgatgagtcagaagattcagcagctcacagccctgggggcagctcaggctactgctaaggcctgagagtttttgcagaaatggggcagagggacaccctttgggcgtggcttcctggtgatgggaagggtcttgtgttttaatgccaataaatgtgccagctgggcagaaaaaaaaaaaaaaaaaaaaaaaaaaaaaaaaaaaaaaaaaaaaaaaaaaaaaaaaaa

SEQ ID NO: 110 - DNA, 2754 bp, Homo sapiens
actcgagccctgggcgctgcttgctaaagagccgagcacgcgggtctgtcatcatgtcgcgttacgggcggtacggaggagaaaccaaggtgtatgttggtaacctgggaactggcgctggcaaaggagagttagaaagggctttcagttattatggtcctttaagaactgtatggattgcgagaaatcctccaagatttgcctttgtggaattcgaagatcctagagatgcagaagatgcagtacgaggactggatggaaaggtgatttgtggctcccgagtgagggttgaactatcgacaggcatgcctcggagatcacgttttgatagaccacctgcccgacgtccctttgatccaaatgatagatgctatgagtgtggcgaaaagggacattatgcttatgattgtcatcgttacagccggcgaagaagaagcaggtttcttcgtttgagtcagtcgccttgattcagaatgtcacgagccttatgatatcatgctgaggcgccttgcaaatccgacaattaagatcctcctagaccttgaggtgatcagcataagaggccagatcccctcgagtcatctacacctagcttcaccttattctttaaagggcagaaaatttgagacggtgatcgccgtaacagtaaatttggcttacaattggggcccccctccggtttagaaagaggaacaccagattgaccacattcccaactagaaaaatcttcttgcgtcaatcaagcctcacctggctcatttggctgtcagtttgatcgtcgttagattgaagaaaacatctagatgcagcgatcggctatagatacttctagatcgtctagatctactagaccatgggccaaagagggtcgacctgcaaacttgcaaggtcacggtctagatcacattctcgatccagaggaaggcgatactctcgctcacgcagcaggagcaggggacgaaggtcaaggtcagcatctcctcgacgattaagatctatctctcttcgtagatcaagatcagcttcactcagaagatctaggtctggttctataaaaggatcgaggtatttccaatccccgtcgaggtcaagatcaagatccaggtctatttcacgaccaagaagcagccgatcaaagtccagatctccatctccaaaaagaagtcgttccccatcaggaagtcctcgcagaagtgcaagtcctgaaagaatggactgaagctctcaagttcaccctttagggaaaagttattttgtttacattattataagggatttgtgatgtctgtaaagtgtaacctaggaaagataattcaaccatctaatcaaaatggatctggattactatgtaaattcacagcagtaagataatataaattttgttgaatgtattaacatcatatggtctgaaaatgtgggtttttatttggcacatttaaataaaatgtttctaactagatttttgatttgtgttcaatattaacacttcttaatttgatatatttgagagtcagacattataattgttaaccttattcatacatacctacattcagaattgaaaggtgttggttaagtcttgaacatcactattctatgcataaaacttggccaggatcttaagggactttgaaaattccatcttacccttgtagctctgggtaagatgacctgagtcccttatgatacagcctgaatgcatcatgacagatccttaagttagctaatccgtttgaagttggtgttagtaggtattgtatgatcagtggtgaagcaagtaggaccactgatgtgtctaaatgagcatgacaggaactaaacgaaactgattaaatgtatgagaaatagaaactgatttctggatgatctttatactaattgcagctttcaggctactaggtggcatagtgttaattaggactccccaagatatggggagttctactctcaatggtcttgtttctttgctttctacattagttaaccagttttataccaaaaaatgcatgtttgaggaattgtctgaaattgggacaaaacaccttcatgtaaaccagctttgcaaaattttccagcccagatactcttcatctattcaaatggattgtcttattctgagcaaagacctgttgttaatcttcaagctaggttttgcagttcccaaccacaacattcttctattttgccaggctggtgcaaagtaattaaagatgtcaatcagaaatgtcaatgagactaaagtggttttgtaaatctcagctatatttagcaacactccatgtagctaatattttttggtagcatctggtagaccttagaatgttacatagccagtaggttctttattcaaattttaagtatcttaagaatagtagggcagtaacagttacttttgagagttttctggtcaagcttttaccaggcattctctagccttggtacaaaaaaaaaaaaaacctgctggttgcgcagatacctaggcttgtccattttatgcatttcagcaaagtcattggatactattgcaacttgggaatactggtctgcatcaagtttattcggtagtttgaccgctagtatgttggaagttatttggattgtttttggaattttgactggctgaattatggttggtataaagttatgtgtataactggcaggcttatttatctgttgcacttggttagctttaattgttctgtattatttaaagataagtttactcaacaataaatctgcagagattgaacaaat

SEQ ID NO: 111 - DNA, 1776 bp, Homo sapiens
ctctatggttcggcggctctaagcgctcagctccgcggtcgtcctccaggtctgtgccgcctccctccggtctcggtggcgcggcacgcgcggctctctaggcctccttcagctctgtggtgacggtggccgaggtggagggccggtctgaagagtggcgggactggcttcacttcctccgcggttcctcggagccgcctcgctcctcttcagggactttgctgagaagggctctcgggcgtccagaccccaccgcaaaggtgtttggcgatccgccgagaagttgttggccccaggagcatccctcggggccgaatgcgcagtggacgatgccccttctgacccaacagatccaagacgaggatgatcagtacagccttgtggccagccttgacaacgttaggaatctctccactatcttgaaagctattcatttccgagaacatgccacgtgtttcgcaactaaaaatggtatcaaagtaacagtggaaaatgcaaagtgtgtgcaagcaaatgcttttattcaggctggaatatttcaggagtttaaagttcaggaagagtctgttacttttcgaattaatttaactgtccttttagactgtttatctatttttggatcaagtcctatgccagggactttaactgcacttcgaatgtgttaccaaggttatggttaccctttgatgctgttcctggaagaaggaggagtggtgacagtctgcaaaatcaatacacaggaacctgaggagaccctggactttgatttctgcagcaccaatgttattaataaaattattctgcagtcagaggggctccgtgaagcattttctgaattggatatgacgagtgaagtcctacaaattaccatgtctcctgacaagccttatttcaggttatctacttttggaaatgcaggaagttcccaccttgactatcccaaagattctgatttgatggaagcatttcattgtaatcagacccaagtcaacagatacaagatttccttactgaaaccctctacaaaggcattagtcctatcttgtaaggtatctattcggacagataacagaggcttcctttcattacagtatatgattagaaatgaagatggacaaatatgttttgtggaatattactgctgccctgatgaagaagttcctgaatctgagtcttgagtatgacaattcactgatatttatgtgtacatttatgatagatgaagttcttattctgagtacagtactctttgtcatttcatattggattttctatagagaagaagcacaatggggaagataggagcaaggtcatgtaccctaatagttactatgttttgtaaatccattttgtagagggcatgtaaataaatgttttcctgtagtcatagattattcaggactgtcctttagttctgtcttttgaactcatgggaataattgtgagtcagcgtaacatttcaagagtctaaaggtggccgggtgtggtggctttaatcccagcactttgggaacccgaggtgggcggatcacctgaggtcaggagttcgaaaccagcctgaccaacgtggagaaaccccatctctactaaaaatacaaaaaattagccggacgtggtggcacatgcctgtaatgccagctactcgggaggctgaggcaggaaaattgcttgaacccgggaggcggaggttgtggtgagctgaaatgacgccattgcactccagcctaggcaataagagcaaaactctgcctcaaaaaaaaaaaaaaaaaaaaaaaa

SEQ ID NO: 112 - DNA, 1445 bp, Homo sapiens; identical to SEQ ID NO: 45

SEQ ID NO: 113 - DNA, 8648 bp, Homo sapiens
cagggagggacgcccccgccgacaggagaattggttcccgggcccgcggcgatgcccccccggtagctcgggcccgtggtcgggtgtttgtgagtgtttctatgtgggagaaggaggaggaggaggaagaagaagcaacgatttgtcttctcggctggtctccccccggctctacatgttccccgcactgaggagacggaagaggagccgtagccaccccccctcccggcccggattatagtctctcgccacagcggcctcggcctccccttggattcagacgccgattcgcccagtgtttgggaaatgggaagtaatgacagctggcacctgaactaagtacttttataggcaacaccattccagaaattcaggatgaatggggatatgccccatgtccccattactactcttgcggggattgctagtctcacagacctcctgaaccagctgcctcttccatctcctttacctgctacaactacaaagagccttctctttaatgcacgaatagcagaagaggtgaactgccttttggcttgtagggatgacaatttggtttcacagcttgtccatagcctcaaccaggtatcaacagatcacatagagttgaaagataaccttggcagtgatgacccagaaggtgacataccagtcttgttgcaggccgtcctggcaaggagtcctaatgttttcagggagaaaagcatgcagaacagatatgtacaaagtggaatgatgatgtctcagtataaactttctcagaattccatgcacagtagtcctgcatcttccaattatcaacaaaccactatctcacatagcccctccagccggtttgtgccaccacagacaagctctgggaacagatttatgccacagcaaaatagcccagtgcctagtccatacgccccacaaagccctgcaggatacatgccatattcccatccttcaagttacacaacacatccacagatgcaacaagcatcggtatcaagtcccattgttgcaggtggtttgagaaacatacatgataataaagtttctggtccgttgtctggcaattcagctaatcatcatgctgataatcctagacatggttcaagtgaggactacctacacatggtgcacaggctaagtagtgacgatggagattcttcaacaatgaggaatgctgcatcttttcccttgagatctccacagccagtatgctcccctgctggaagtgaaggaactcctaaaggctcaagaccacctttaatcctacaatctcagtctctaccttgttcatcacctcgagatgttccaccagatatcttgctagattctccagaaagaaaacaaaagaagcagaagaaaatgaaattaggcaaggatgaaaaagagcagagtgagaaagcggcaatgtatgatataattagttctccatccaaggactctactaaacttacattaagactttctcgtgtaaggtcttcagacatggaccagcaagaggatatgatttctggtgtggaaaatagcaatgtttcagaaaatgatattccttttaatgtgcagtacccaggacagacttcaaaaacacccattactccacaagatataaaccgcccactaaatgctgctcaatgtttgtcgcagcaagaacaaacagcattccttccagcaaatcaagtgcctgttttacaacagaacacttcagttgctgcaaaacaaccccagacttctgtggtacagaatcaacaacagatatcacaacagggacctatatatgatgaagtggaattggatgcattggctgaaattgagcgaatagagagagaatcagctattgaaagggagcgcttctcaaaagaagttcaagataaagataagcctttgaaaaaaagaaaacaagattcttacccacaggaggctgggggtgctacaggaggtaatagaccagcttctcaggagacgggttctacgggaaatgggtcaaggccagcattaatggttagcattgatcttcatcaggcaggaagagtggactctcaggcttctataactcaggattcagactccataaaaaagcctgaagaaatcaaacaatgtaatgatgcacctgtttctgttcttcaggaagatattgttggaagtcttaaatctacaccagaaaaccatcctgagacacctaaaaaaaagtctgatcctgagctttcaaagagtgaaatgaaacaaagtgaaagtagattagcagaatctaaaccaaatgaaaaccgattggtggagacaaaatcaagtgaaaataagttagaaactaaagttgagacccaaacagaagaacttaaacagaatgagagcagaacaactgaatgcaaacaaaacgagagcaccatagttgagcctaaacaaaatgaaaatagactgtctgacacaaaaccaaatgacaacaaacaaaataatggcagatcagaaacaacaaaatcaaggcctgaaaccccaaagcaaaagggtgaaagccggcctgagactccaaaacaaaagagtgatgggcatcctgaaaccccaaaacagaagggtgatggaaggcctgaaactccaaagcaaaaaggtgagagccgccctgaaactccaaagcaaaaaaatgaagggcgacctgaaacaccaaaacacaggcatgacaataggagggattctggaaagccatctacagagaaaaaacctgaagtgtctaaacataaacaagatactaaatctgactcacctcggttaaaatcagaacgagctgaagccttaaagcagagacctgatgggcgatctgtttctgagtcactaagacgtgaccatgataataaacaaaaatcagatgacaggggtgaatcagagcgacatcgaggggatcagtctagggttcgaagaccagaaacattgagatcctctagtagaaatgaacatggcattaaatctgatagttcaaaaactgataaactagaacgaaaacacaggcatgaatcaggggactcaagggaaagaccatcttctggggaacaaaaatcaagacctgacagtcctcgtgttaaacaaggagattctaataaatcaagatctgataaacttggttttaaatcaccaactagtaaagatgacaaaaggacagagggtaacaagagtaaagtagacactaataaagcacaccctgacaataaggcagaatttccaagttatttgttggggggcaggtctggtgcgttgaaaaattttgtcattccgaaaatcaagagggataaagatggcaatgttactcaggagacaaagaaaatggaaatgaaaggagagccgaaagacaaagtagaaaaaataggattagttgaagatctaaataaaggagctaagcctgtagttgtgctacaaaaactgtctttggatgatgttcagaaacttattaaagatagagaggacaaatcaagaagttcccttaaacctatcaagaataaaccatcaaagtcaaataaaggtagtatagatcaatcagtgttaaaagaattaccccctgaactcctggcagaaattgagtccaccatgccactttgtgaacgtgtgaaaatgaacaaacgcaagcgtagcacagttaatgaaaagccaaaatatgctgaaatcagttcagatgaagataatgatagtgatgaagcttttgaatcctctaggaaacgacataaaaaagatgatgataaagcttgggaatatgaagagcgtgacagaagaagctctggggatcataggagaagtggccactctcatgaaggaagaaggagttcaggtggtggtcgttatcgaaaccgaagtccgtcagattctgacatggaagattattctcctcctcccagccttagtgaggttgctaggaaaatgaagaaaaaagaaaaacagaagaaaaggaaagcatatgaaccaaaactaacacctgaagaaatgatggactcttcaacttttaagagattcacagcctcaatagagaatattttggataatttggaagatatggattttactgcgtttggtgatgatgatgaaattcctcaggaactgctcttaggaaaacatcagcttaatgaacttggcagtgaatctgctaaaataaaagcaatgggtataatggataagctttcaactgacaaaactgtgaaagtcttaaatatcttggagaagaatattcaggatgggtcaaagctttccactttgttaaatcataataacgatactgaagaagaagaaaggttatggagagaccttattatggagagagttacaaaatcagcggatgcttgtcttacaactatcaacattatgacatcccctaacatgccaaaagctgtgtacattgaggatgtaattgaaagagttatacagtacactaaatttcatttgcagaatacactttatcctcagtatgatcctgtttacagattagatcctcatggaggaggcttattaagttcaaaagcaaaacgggctaaatgttctacccataagcagagagtaatagtaatgctttataacaaagtttgtgacattgttagcagcttatcagaattgctagagatacaacttcttacagacacaacaattcttcaggtttcatctatgggaataacaccattttttgtggaaaatgtcagtgaactacagttgtgtgccattaagttagtcactgcagtattctcaagatatgaaaaacataggcagttaattttggaagaaatttttacttcacttgcaagattaccaaccagcaagaggagtttaaggaacttcaggttaaacagtagtgatatggatggagaacctatgtatattcagatggttacagcactggttttacaacttattcagtgtgtggtacacttaccatcatcagagaaggactctaatgcagaagaagattcaaataaaaaaattgaccaggatgttgtcattactaactcttatgaaacagctatgcgaacagcccaaaacttcctctccatcttccttaaaaaatgtggtagtaagcaaggtgaagaagattacagaccactgtttgaaaattttgttcaagaccttctttcaacagtcaataagcctgaatggccagctgctgaactactccttagtttgttagggagactgttggttcatcagttcagtaacaagtcaacagagatggctttaagagtggcatctcttgattaccttggaactgttgctgcacggctaagaaaagatgctgttacaagcaaaatggatcaaggatctatagaacgcattttaaaacaggtttcaggaggggaagatgaaatccaacaattacaaaaagcattgcttgattacttggatgaaaacactgagactgatccttcactagtgttttctcgtaaattctatatagcccagtggtttcgagacacaactctggaaacagaaaaagcaatgaaatcacaaaaagatgaagaatcatctgaaggaacacatcatgcaaaggaaattgagacaactggccaaattatgcatcgagctgaaaaccgaaaaaagtttcttagaagcattatcaaaaccacaccttctcagtttagcacattaaagatgaactctgatactgtggactatgatgatgcttgcttgattgttcgatacttggcctccatgaggccgtttgcccagagctttgatatttatttgacacagatcctacgagttcttggtgaaaatgcaattgctgttcgaacaaaagccatgaagtgtttgtctgaggttgttgctgtagaccccagtattctagcaaggcttgatatgcaacgaggtgttcatggacgattgatggataattcgactagtgtccgagaagcagcagtagaattactaggtcgatttgtcctttgtcgacctcagcttgctgaacagtattatgatatgctgattgaaagaatattggatactggtatcagtgtcaggaaaagagtaataaagattctcagagacatttgtattgaacaaccaacatttccaaaaatcacagaaatgtgtgtaaaaatgattcgcagagtcaatgatgaagagggcattaagaaattagtaaatgaaacattccagaaactctggtttactccaactccacacaatgacaaagaagcaatgacaaggaaaattttaaacattaccgatgtggttgcagcatgcagagatactggatatgactggtttgagcaactgcttcaaaacttgttgaagtccgaagaggattcctcatataaacctgtgaagaaagcttgtactcaacttgttgataacctagttgagcacattcttaaatatgaggaatctctagctgactctgacaataaaggtgtgaattctggaagattggtagcttgcataaccactttgttcttattcagcaaaataagaccccagctcatggttaaacatgcaatgactatgcaaccataccttaccactaaatgtagtacgcaaaatgatttcatggttatctgcaatgttgcaaaaatcctagagctagttgtaccactgatggagcatccaagtgaaacttttcttgccactattgaggaagatctaatgaagctcatcatcaaatatggcatgactgtagtgcaacattgtgtgagctgtcttggagctgttgtaaataaagtgacacaaaattttaaatttgtgtgggcttgtttcaatagatactatggtgccatttcaaaattaaaaagtcaacaccaagaggacccaaataacacttcacttctaacaaacaaaccagcacttcttagatcccttttcaccgttggagcactatgtcggcattttgattttgatctggaagattttaaaggcaacagcaaggttaacataaaagataaagtacttgaactattgatgtattttacaaaacactcagatgaagaagtacaaacaaaagctatcattggtctaggatttgcctttattcagcatccaagtctaatgttcgagcaagaagtgaagaatctatataataatattttatctgataagaactcctcagtcaatttaaaaatacaagtgttaaaaaacctccagacctacctacaagaagaagatacacgtatgcagcaggcagatagagactggaagaaagttgcaaaacaggaagacttaaaagaaatgggtgatgtttcctcagggatgagtagttccatcatgcagctttatctcaaacaggtgcttgaggcattttttcacacccagtcaagtgtacgccactttgccctaaatgtcattgcattgactctaaatcaaggtcttattcatccagttcagtgtgtgccatatttaattgctatgggcacagacccagaacctgctatgcggaacaaggctgatcagcaacttgtggaaatagacaaaaaatatgctggattcattcatatgaaagcagtggctggtatgaagatgtcttaccaggtacaacaggcaatcaacacatgcctaaaagatcctgtaaggggtttcagacaagacgagtcctctagcgctttgtgttcacacctttactccatgatccgtggaaaccgccaacacagacgagcctttcttatttctttactcaacctctttgatgacacagcaaaaacagacgtgactatgctcttgtatatagcagacaatctagcctgttttccataccagacacaggaagagccgttgtttataatgcatcatatagacattacactctcagtttctggtagtaacctactgcagtcattcaaggagtctatggtaaaggacaaaaggaaagagagaaaatcatcacctagtaaggaaaatgagtcaagcgacagtgaagaagaagtttccaggcctcggaagtcacggaaacgtgtagattcagattcagattcagattcagaagacgatataaattcagtgatgaaatgtttgccagaaaattcagctcctttaatcgaatttgcaaatgtgtcccagggtattttattacttctcatgttaaaacaacatttgaagaatctttgtggattttctgatagtaaaattcagaagtactctccatctgaatctgcaaaagtatatgataaagcgataaaccgaaaaacaggagttcattttcatccaaaacaaacactggacttcctgcggagtgacatggctaattccaaaatcacagaagaggtgaaaaggagtatagtaaaacagtatctagatttcaaacttctcatggaacatctggaccctgatgaagaagaagaagaaggggaggtttcagctagcacaaatgctcggaacaaagcaattacctcactgcttggaggaggcagccctaaaaataatacagcagcagagacagaagatgatgaaagtgatggggaggatagaggaggaggcacttcaggggtgaggcggaggaggagtcaacgtatttcgcagcgtattacgtaaaatgatttttatgtgcttatatatgtcagtctattaaatgtacaccaagtaatgtaatacttaaaagagaaaacattttgtagatagagattctctacttacccgtttatacatccttttgtagaaagtttaacataaaagacaataaaaaaacagaaatgagatttatccagcaaaaa

SEQ ID NO: 114 - DNA, 6307 bp, Homo sapiens; identical to SEQ ID NO: 46

SEQ ID NO: 115 - DNA, 4746 bp, Homo sapiens
gttctccgctgaggaggagcggggcagaggagggaggcagcgggtgagagttcagagttcagcagcagcagcccgagcccatgattcccatatgccctgtagtttctttcacctatgtgcccagccggctgggggaagatgccaaaatggcgaccggcaactactttggattcacccacagcggggcggcggcggcggcggctgcggcccaatatagccagcagccagcttcgggtgtagcctattctcatccaactacagttgctagctacactgtccatcaggctccagtagctgctcacacagttactgctgcctatgcaccagcagccgccacagttgcagttgccaggcctgctccagtagctgttgcagctgctgcaacagctgctgcttatggaggctaccccactgcacacacagcaactgactatggttatactcagaggcaacaagaagcaccaccaccaccacccccagctactacacaaaactaccaggattcatactcatatgtaaggtccacagctcctgctgtagcttatgatagtaagcaatactaccaacaaccaacagcaactgctgctgctgtagctgccgctgcccaacctcagccttctgttgctgaaacttactatcagacagcccccaaagcaggttacagccaaggtgcaactcagtatactcaagcccagcaaactcgacaagtgacagccataaaaccagccacaccaagtccagctaccactactttctccatctatcctgtatcctccaccgtacagccagtagcagctgcggctactgtggtgccatcctatactcagagtgctacttacagtaccacagcagttacatattctggtacgtcttattcaggttatgaagcagcagtgtattcagctgcatcttcctactatcaacagcagcagcagcaacagaagcaggcagcagcagcagctgctgctgctgctgcaacagctgcctggacagggaccacctttactaaaaaagcaccattccaaaataaacaactgaaaccaaaacagcctcccaaaccaccacagattcactattgtgatgtttgtaagatcagctgtgctggaccacagacttataaagaacatttagaaggacagaaacataaaaaaaaagaagctgcattgaaagcctcacaaaataccagcagcagcaacagttctactcgtgggactcaaaatcagctacgttgtgagctctgcgatgtgtcttgtacaggagcagatgcgtatgctgcccacattcgtggtgctaagcatcagaaagtggttaagttacacacaaaacttggtaaacccattccatcaacagaaccaaatgttgttagccaagctacttcttcaacagctgtatctgcttcaaagccgactgcctctccttcaagcattgcagcaaacaattgtactgtgaatacgtcatcagttgcaacgtcttcaatgaagggtcttacgactacaggaaactcgtctcttaatagcacatctaacactaaagtatcagcagtgcctacaaatatggctgccaagaaaacatctacccccaaaataaattttgttggtggtaataagctgcagtcaacaggaaataaagcagaagacataaaaggaaccgaatgtgttaaaagtactcctgtcacttctgctgtgcagattcctgaagtaaagcaagacacagtgtcagaaccagtcacacctgcatctcttgctgctttacagagtgatgtgcagccagtgggccatgattatgtggaagaggtacgaaatgatgaaggaaaagtaattcggttccattgtaaattatgcgagtgcagctttaatgatcccaatgctaaggagatgcacttaaaagggcgaagacacagacttcaatataaaaaaaaagtaaatccagatttgcaagtagaagtaaagcctagtattcgagcaagaaagattcaagaagagaaaatgaggaagcaaatgcagaaggaggagtactggcgaagacgagaagaagaggagcgttggagaatggaaatgagacgttatgaagaggacatgtactggaggagaatggaggaagaacaacatcattgggatgatcgccgccgaatgccagatggaggttatcctcatggtcctccaggcccattaggccttctgggagtccgaccaggcatgcctcctcagcctcaggggcctgcacccttacgtcgtcctgactcatctgatgaccgttatgtaatgacaaaacatgccaccatttatccaactgaagaggagttacaggcagttcagaaaattgtttctattactgaacgtgctttaaaactcgtttcagacagtttgtctgaacatgagaagaacaagaacaaagagggagatgataagaaagagggaggtaaagacagagctttgaaaggagttttgcgagtgggagtattggcaaaaggattacttctccgaggagatagaaatgtcaaccttgttttgctgtgctcagagaaaccttcaaagacattattaagccgtattgcagaaaacctacccaaacagcttgctgttataagccctgagaagtatgacataaaatgtgctgtatctgaagcggcaataattttgaattcatgtgtggaacccaaaatgcaagtcactatcacactgacatctccaattattcgagaagagaacatgagggaaggagatgtaacctcgggtatggtgaaagacccaccggacgtcttggacaggcaaaaatgccttgacgctctggctgctctacgccacgctaagtggttccaggctagagctaatggtctgcagtcctgtgtgattatcatacgcattcttcgagacctctgtcagcgagttccaacttggtctgattttccaagctgggctatggagttactagtagagaaagcaatcagcagtgcttctagccctcagagccctggggatgcactgagaagagtttttgaatgcatttcttcagggattattcttaaaggtagtcctggacttctggatccttgtgaaaaggatccctttgataccttggcaacaatgactgaccagcagcgtgaagacatcacatccagtgcacagtttgcattgagactccttgcattccgccagatacacaaagttctaggcatggatccattaccgcaaatgagccaacgttttaacatccacaacaacaggaaacgaagaagagatagtgatggagttgatggatttgaagctgaggggaaaaaagacaaaaaagattatgataacttttaaaaagtgtctgtaaatcttcagtgttaaaaaaacagatgcccatttgttggctgtttttcattcataataatgtctacattgaaaaatttatcaagaatttaaaggatttcatggaagaaccaagtttttctatgatattaaaaaatgtacagtgttaggtattatttgaatggaaagacacccaaaaaaaaaaatgtgctccgactagggggaaaacagtagttccgattttttcccattatttttattttattttctggttgccctagcttccccccctatttttgtgtcttttattaactagtgcattgtcttattaaatcttcactgtatttaatgcaggatgtgtgcttcagttgctctgtgtattttgatattttaatttagaggttttgtttgctttttgacactagttgtaagttactttgttatagatggtatcctttaccccttcttaatattttacagcagtacgtttttttgtaacgtgagactgcagagtttgtttttctatatgtgaaggattacaacacaaaaagttatcctgccattcgagtgctcagaactgaatgtttctgcagatcttgtggcatttgtctctagtgtgatatataaaggtgtaattaagacagagttctgttaatctaatcaagtttgctgttagttgtgcattagcagtataaaagctaatatatactatatggtcttgcaacagttttaaagcctctgcataattgataataaaaatgcatgacattcttgtttttaatagacttttaaaatcataattttaggtttaacacgtagatctttgtacagttgactttttgacatagcaaggccaaaaataactttctgaatatttttttcttgtgtataagtggaaagggcatttttcacatataagtgggctaaccaatattttcaaaagaacttcatcattgtacaactaacaacagtaactagcccttaattatggtgacagttccttattggtgtgtgtgagattactctagcaactattacagtataacacagatgatcttctccacacaccccatcacccagataatttacagttctgttaacagtgaggttgataaagtattactgataaaaaattatctaaggaaaaaaacagaaaattatttggtgtggccatcttacctgcttatgtctcctacacaaagctaaatattctagcagtgatgtaatgaaaaattacatcttactgttgatatatgtatgctctggtacacagatgtcattttgttgtcacagcactacagtgaaatacacaaaaaatgaaattcatataatgacttaaatgtattatatgttagaattgacaacataaactacttttgctttgaaatgatgtatgcttcagtaaaatcatattcaaatttaaaaaaaaaaaaaaaaaaaaaaaaaaaaaaaa

SEQ ID NO: 116 - DNA, 2220 bp, Homo sapiens
ggaaaattacccggtatcgttagagctacaccaaaattgcattgagccaaacttgccaccaagagcccaacaatcaccatgatgctgagcacggaaggcagggaggggttcgtggtgaaggtcaggggcctaccctggtcctgctcagccgatgaagtgatgcgcttcttctctgattgcaagatccaaaatggcacatcaggtattcgtttcatctacaccagagaaggcagaccaagtggtgaagcatttgttgaacttgaatctgaagaggaagtgaaattggctttgaagaaggacagagaaaccatgggacacagatacgttgaagtattcaagtctaacagtgttgaaatggattgggtgttgaagcatacaggtccgaatagccctgatactgccaacgatggcttcgtccggcttagaggactcccatttggctgtagcaaggaagagattgttcagttcttttcagggttggaaattgtgccaaatgggatgacactgccagtggactttcaggggcgaagcacaggggaagcctttgtgcagtttgcttcacaggagatagctgagaaggccttaaagaaacacaaggaaagaatagggcacaggtacattgagatcttcaagagtagccgagctgaagttcgaacccactatgatccccctcgaaagctcatggctatgcagcggccaggtccctatgataggccgggggctggcagagggtataatagcattggcagaggagctgggtttgaaaggatgaggcgtggtgcctatggtggagggtatggaggctatgatgactatggtggctataatgatggatatggctttgggtctgatagatttggaagagacctcaattactgtttttcaggaatgtctgatcatagatacggagatggtgggtccagtttccagagcaccacagggcactgtgtacacatgagggggttaccttacagagccactgagaatgatatttataatttcttctcacctcttaatcccatgagagtacatattgaaattggacccgatggcagagttaccggtgaggcagatgttgaatttgctactcatgaagatgctgtggcagctatggcaaaagacaaagctaatatgcaacacagatatgtggagctcttcttaaattctactgcaggaacaagtgggggtgcttacgatcacagctatgtagaactttttttgaattctacagcaggggcaagtggtggcgcttatggtagccaaatgatgggagggatgggcttatccaaccagtctagttatggaggtcctgctagccagcagctgagtggtggttatggaggtggttatggtggtcagagcagtatgagtggatatgaccaagttctgcaggaaaactccagtgactatcagtcaaaccttgcttaggtagagaaggagcactaaatagctactccagatataaaagctgtacatttgtgggagttgaatagaatgggagggatgtttagtatatccagtatgattggtaaatgggaaatataattgattctgatcactcttggtcagcttctctttctttatctttctttctccttttttaagaaaacgagttaagtttaacagttttgcattacaggcttgtgattcatgcttactgtaaagtggaagttgagattattttaaaacttcaagctcagtaattttgaacactgaaacattcatctaggacataataacaaagttcagtattgaccataactgttaaaacaatttttagctttcctcaagttagttatgttgtaggagtgtacctaagcagtaagcgtatttaggttaatgcagtttcacttatgttaaatgttgctcttataccacaaatacattgaaaacttcggatgcatgttgagaaacatgcctttctgtaaaactcaaatataggagctgtgtctacgattcaaagtgaaaacatttggcatgtttgttaattctagctttttggtttaatatcctgtaaggcacgtgagtgtacactttttttttttttaaggatacgggacaattttaagatgtaataccaatactttagaagtttggtcgtgtcgtttgtatgaaaatctgaggctttggtttaaatctttccttgtattgtgatttccatttagatgtattgtactaagtgaaacttgttaaataaatcttccttttaaaaactggaaa

SEQ ID NO: 117 - DNA, 4283 bp, Homo sapiens
ctccgtacgggggctttttctgtctgtctgtctggctggcaggctggctttccccctctttcccacggagcccgagccgggcgcccggtggggagtggggagtgggtggggggagccagcagagttccattttggaacgcccgtgccgcgtctccgcgttcccagcccgggtccccgcgttcacagccccagcgcaggtctggatgtaccgactgcttttggaataaaaagattcccaggatgtgagcaacacgggaccgatatgatgcttcctggtgtgtttagtggttggtgccattccaattttctgtgctgaaatcattctgaaaactcaaacagtagacttcagcacacaaggaaagccaaagccatttgagggggaataaagccaaaagcctttcaccttattcgttccaagaatctcaccgccccctccttatccccctccaaaaataagccattgcacacagacaggcagcatggctagcaaacgaaaatctacaactccatgcatggttcggacatcacaagtagtagaacaagatgtgcccgaggaagtagacagggccaaagagaaaggaatcggcacaccacagcctgacgtggccaaggacagttgggcagcagaacttgaaaactcttccaaagaaaacgaagtgatagaggtgaaatctatgggggaaagccagtccaaaaaactccaaggtggttatgagtgcaaatactgcccctactccacgcaaaacctgaacgagttcacggagcatgtcgacatgcagcatcccaacgtgattctcaaccccctctacgtgtgtgcagaatgtaacttcacaaccaaaaagtacgactccctatccgaccacaactccaagttccatcccggggaggccaacttcaagctgaagttaattaaacgcaataatcaaactgtcttggaacagtccatcgaaaccaccaaccatgtcgtgtccatcaccaccagtggccctggaactggtgacagtgattctgggatctcggtgagtaaaacccccatcatgaagcctggaaaaccaaaagcggatgccaagaaggtgcccaagaagcccgaggagatcacccccgagaaccacgtggaagggaccgcccgcctggtgacagacacagctgagatcctctcgagactcggcggggtggagctcctccaagacacattaggacacgtcatgccttctgtacagctgccaccaaatatcaaccttgtgcccaaggtccctgtcccactaaatactaccaaatacaactctgccctggatacaaatgccacgatgatcaactctttcaacaagtttccttacccgacccaggctgagttgtcctggctgacagctgcctccaaacacccagaggagcacatcagaatctggtttgccacccagcgcttaaagcatggcatcagctggtccccagaagaggtggaggaggcccggaagaagatgttcaacggcaccatccagtcagtacccccgaccatcactgtgctgcccgcccagttggcccccacaaaggtgacgcagcccatcctccagacggctctaccgtgccagatcctcggccagactagcctggtgctgactcaggtgaccagcgggtcaacaaccgtctcttgctcccccatcacacttgccgtggcaggagtcaccaaccatggccagaagagacccttggtgactccccaagctgcccccgaacccaagcgtccacacatcgctcaggtgccagagcccccacccaaggtggccaaccccccgctcacaccagccagtgaccgcaagaagacaaaggagcagatagcacatctcaaggccagctttctccagagccagttccctgacgatgccgaggtttaccggctcatcgaggtgactggccttgccaggagcgagatcaagaagtggttcagtgaccaccgatatcggtgtcaaaggggcatcgtccacatcaccagcgaatcccttgccaaagaccagttggccatcgcggcctcccgacacggtcgcacgtatcatgcgtacccagactttgccccccagaagttcaaagagaaaacacagggtcaggttaaaatcttggaagacagctttttgaaaagttcttttcctacccaagcagaactggatcggctaagggtggagaccaagctgagcaggagagagatcgactcctggttctcggagaggcggaagcttcgagacagcatggaacaagctgtcttggattccatggggtctggcaaaaaaggccaagatgtgggagcccccaatggtgctctgtctcgactcgaccagctctccggtgcccagttaacaagttctctgcccagcccttcgccagcaattgcaaaaagtcaagaacaggttcatctcctgaggagcacgtttgcaagaacccagtggcctactccccaggagtacgaccagttagcggccaagactggcctggtccgaactgagattgtgcgttggttcaaggagaacagatgcttgctgaaaacgggaaccgtgaagtggatggagcagtaccagcaccagcccatggcagatgatcacggctacgatgccgtagcaaggaaagcaacaaaacccatggccgagagcccaaagaacgggggtgatgtggttccacaatattacaaggaccccaaaaagctctgcgaagaggacttggagaagttggtgaccagggtaaaagtaggcagcgagccagcaaaagactgtttgccagcaaagccctcagaggccacctcagaccggtcagagggcagcagccgggacggccagggtagcgacgagaacgaggagtcgagcgttgtggattacgtggaggtgacggtcggggaggaggatgcgatctcagatagatcagatagctggagtcaggctgcggcagaaggtgtgtcggaactggctgaatcagactccgactgcgtccctgcagaggctggccaggcctagacagggaagtctgttagaactgctgtgctgatcaacgggacgctccgtctttgaagaaagaagagatggtctctccccagccatgggccacccttgccagtgactccaagtggaactacttagctcgcgtgtgcctggagggtgcgggaagtccagcgactctcagacgcacctcccagaggaccggtgggaattgttcatagtgccaaagtcctactactgcgttttcagtgggtccttgtacatagtttgctcctctgccctagccctcacctcttgctatactggaaccgatttgtacaatgtgggaattttgttacctttttaatcaagggcaacttccttttccagcactaccattgtaaggtttttttcaggagggagggctaaccaccttgcttttctcttttctctttttcttttttttatttttgttttattaatttggggaaaggggtgttagcattagtgccatgatatctactggattttaagcagggagactttatttttaaaggtaggttgaaatttgggagatttctcggcaggaagggctgaaatccaggcccctgtctcaacttggagagaggtgacagacggcagatcttccaaatcaaattcctttccagttcttcccctggctgcctttttgggggtccctgccttagccccacacaaggctttctgaactgccaagaggggatctggcttctcaactgctcggcctcttgggccaggctgtgcccagccagccctgggagaactgggtagcaggtggctgacttctttaagcacctttctaaataccagcagaagaggctcccgcctctgttagcatgatcagtactattgtgacattaaaacaacaacaataagatcttcctatctggagggtacagaggtgaatggctttggttttcatttctcttcttcactgccttttctcggtgtggtatttgacaagattttagctcaaagcctcaccatgaattgattttttttgtttgtgtgtgtgtttgttttgggacaattttagatacctgagtgcactttttcagttagtcctaacttttaaaagaaggaaaaccaagagacatatctggtgtacgtgttgcagtatgaactctggttgcaatccctccccctcccacactgccccccatttgagtacgccgcacaagtcaaacgctaggaagtttgaataaaaccaatttttctaacttgttgctcatttgttgtaactcaataaagcaaagactaaacatttttataaaaaaaaaaaaaaaaaaa

SEQ ID NO: 118 - DNA, 596 bp, Homo sapiens
tggctgggatcatccgcggcggccgggctcgtggggcgcctggagtgagggttctggttcccgccggcgaggattgttaaaatgagtcttcggaagcaaacccctagtgacttcttaaagcaaatcatcggacgaccagttgtggtaaaattaaattctggagtggattatcgaggggtcctggcttgcctggatggctacatgaatatagccctggagcagacagaagaatatgtaaatggacaactgaagaataagtatggggatgcatttatccgaggaaacaatgtgttgtacatcagtacacagaagagacggatgtgaagacaccaagagagcaacgcttttcatagttggatatatttttttatgaattttttctaatttttgcttcttttgtgatacaatttgtcctctttttataatagttggtgatttttcactgacatgtgagtaagataaatgtatacaattgtggatttaattgtgaaatgttctttcacttgtaagtttcagtcattttcttttacctcgttgtcagtgtacagaatgctaaaataattaaaaaaagacaaaataaaaaaaaaaaaaaaaaa

SEQ ID NO: 119 - DNA, 4125 bp, Homo sapiens
cgactgggccaggcgccggggcaggaagggaggcggccgccgtgccattcttaaaggcgcccgagtgtaggcgacaggccgctgacggccggaaggaaaatgagtgagtctttggttgtttgtgatgttgccgaagatttagtggaaaagctgagaaagtttcgttttcgcaaagaaacgaacaacgctgctattataatgaagattgacaaggataaacgcctggtggtactggatgaggagcttgagggcatttcaccagatgaacttaaagatgaactacctgaacgacaacctcgcttcattgtgtatagttataaatatcaacatgatgatggaagagtttcatatcctctgtgctttattttctccagtcctgttggatgtaagcctgaacaacagatgatgtatgctggaagtaagaataagctagtccagacagctgaactaaccaaggtatttgaaataagaaataccgaagacctaactgaagaatggttacgtgagaaacttggattttttcactaatgtgaacttctgtgtttctaaagtatttatgtattaacctgaccatactggaatcagacataaatacttatttatgcctaaaaatgcactgttacttacagtttgtttcctgcagtaaagaaaaattcttcatttgtgcaaaatttgaacaaagaggaaatcatcttcatagtaatgaaactttgtaaagtgtttccttatattggtaattgttaggtggactacttttctccagggactttttgcactcttgtgactaatttctataacttatggttcggaatttgttactatttacagacaccattggaaagtggatatattagattgtgagagacaacagttgcctccttttgacaaatactggatattagcagtttatttatgaaaatagcgtattatcacttgtcaaatcattgaaattcatttggggtcaaagacttgagtgacccagtattgagccatgaataatttagtgtaacctgtattacaagtacattgatgaattctgtatcttctttggtttcctgtatctttttaatcaagtctagaaactatgttcatcagtcactcatttttaaggtcgggagttagattttatgatagaattatgactgttagcttttctccttatagcatcttagtcttagaaattggtgggttgtaataatcaagggcttcattccttttatgtcatttctagacagttttgaatctaggttaataacactttatttataaagcacctcaatgtcctgtgaacactaattattttaaatgtgttaatactgtgcctttgatttgttagctttaaagttagtttaagacttttacactgccagtattccacatttggtgaaattaatacttttttaaagggtccaaataaaataattttctaatgtgtatatctgaaatttgtaataaaatcaacttcatattttaaaaattccaactatctgcttgcattggtgaatatatggcagtcgagagttataattttgggtatacttgtggttagttttgtgccataggaaaaaattatcttaaaactttggccatagttaataacattaacacttcaatagcaatcacatcttatatcctaaatgtcagaagatattctgaactggatgcctgaatagttaactaaaccagtcttgttagatgatggtactcttggcataaagcgaggattctgatatttggcatacttgtaaaaacaaatacataagtaaccattgaacattaatttgataataggtctagagactctaaaaactaaccaaacttggtgagtgtattcttatattaagaatatcttagtcatctcaaaactagcaaaatttaaattttggcatgttttccattcatatgttctttgcattttatttttgaggtttctgtgagaagtaaagatagttggaatttttgcgatattgaatagaacatcttctgttcccaacactgtttggcttcactaatttagaagtcaggaagcaatagaaagttggagatgaggaagtgctagagtaggtgtttgttttggttcttggagggaaaagattctttattccaatttccagagagaagagaaaactcacccaggaagtttaaaaattctttaaacaggtattttgatattggagaataacatgcatataattctgtaggaatgcacatgtaatccaagtgagtggagagtgtttttaatgtttttgaatgaaggaaatgaggttttgtttcacctgttttgcagcagtaagagaaactagtgctgcaagaatgtattttttaatgaagttccttattttgtcttgcatgttttagttttgcttatttttaaatttggaggtcctccataatgtcagataatattgacctgccatacgttagcactcttagttccgctactgtctttaacaggagcaaagagctgtgataaaccatgcttttttgagcttgtctgactcctaattaataacatgtttttggcaagacaacagattgaggttagaggatcagtaggacatttttattccatctgtcctatggggaaatttacaaatcccgtgctctaaaatgttctcaaacatttatatagatttccctttcatcttactaaattttgcattgttcttttcaagtatgtttcgtatttactgtctttttttctgccatttcccaaataataactccagatttcataattccagtttttacattccgttatctttctggtacaaccattcccattcagccttaaatctgagtcctttttagcagcaacttttttcctgggatcctccttcgtggtcttctaagtcagtgttagttttgaaatttttggccctgcataagttctgcatagcatctaatgtcaaaatagaaccaactggtaatcacagtattatttagtgtggtttccatgacaacaaaaatacatacgaagaaaacttctcaggttactatgctgaaattccaaaatgtctgagttttgaatagtgatcactttgttctggtattgacgcaattatattaggaaaaaagttggttgactgtttttgtttaattgacttctaaaatgttcaaattgtctagttctaaaagtttactaaatgcctagtgcagttaaacatactcttgtttaagtgtgtgttgctaaattttttactgtcattactaaataatctgtgtggcaaaatgtgtgtcagcacttttccctccttttttatctcctattttcaggagtcaaatgtagccataaactgtatccttgtctgacactttagctaaaaatttccagttaggggagtttattgccaaattaaatttggctgttccccccaacccatatagatattaaggaaggtgtacttaaaaaatgtttggactgcttttaaaacctgagcaatgtcattaatccatatgtggactagtgatgaatagatattttcataagagtttaaatgctgatatttggtggaagtagagagtaactcatattctatcaattcaagtattcttactatggttgctttccctatttgttcaatagactgataatactggaatttatagagtttgagccattacaacttttgtgaggatgtgtttcaaacatttctggacaaatcttattttgtatttctggaagaatgtagtaatcttctagaccgcttaaaaccaatgctcccaagctgaatattcttgagaaatttgtttttattatgccatttgacatttcaaatcagtgctcatatacagtaaacttgtgatagaaattgtattttattgctttttggattataattcatataaatataattacttgaatattgtttgagatcattaacatgccagggcagttcccactgatttagatggtccaagataatctcattcaggaggcttgaaacattaatggtttagtcttgtgaattttaacagttctctgtcatcgtttaacaaaaccaacaactgacacaactccttaagctgtggtttcagtctctgctagttcatattgcatgtttattttggacagtcttttgttaagcatggtgcttgtactggtttaaataaaatgttaacatt

SEQ ID NO: 120 - DNA, 3811 bp, Homo sapiens; identical to SEQ ID NO: 53

SEQ ID NO: 121 - DNA, 2207 bp, Homo sapiens
actgacggccggccggcttcccggaactggaaggttacattgattacccacctagtacaacatcttacgggaagagcatagtatttcctagaggaatatgaacataacaggaaggtatcattggctctgaattaaatttgaacttgtcccctgaatagctacaggttttggaagctgaatcaatgttatcagatgagttagaatccaaaccagagctcctggtacagtttgttcagaatacgtccatcccattgggacaggggcttgtagaatcagaagctaaagatattacttgcttgtccctccttcccgtgactgaagcctcagaatgcagtcggctaatgttaccagatgatactacaaatcattctaactcctccaaggaggtcccttcctcagctgttttgagaagccttcgggtgaatgtgggtccagacggagaggagacgagagctcagactgtacagaaatccccggagtttttgtccacttcagagtcttctagcttgttgcaagatctacagccaagtgatagcacttcttttattcttcttaacctaacaagagcaggtctgggctcttcagctgagcacttagtgtttgtacaggatgaggcagaagattcagggaatgatttcctctccagtgagagcacagacagtagcattccatggttcctccgggttcaggagttggcccatgacagtttgattgctgctactcgtgcacaactggcaaagaatgcaaaaaccagcagcaatggagaaaatgtccaccttggttctggtgatgggcagtcaaaagattctgggccccttcctcaagtggaaaagaagctcaagtgtacagttgaaggttgtgaccggacatttgtatggccagctcactttaaataccacctcaagactcatcgaaatgaccgctccttcatctgtcctgcagaaggttgtgggaaaagcttctatgtgctgcagaggctgaaggtgcacatgaggacccacaatggagagaagccctttatgtgccatgagtctggctgtggtaagcagtttactacagctggaaacctgaagaaccaccggcgcatccacacaggagagaaacctttcctttgtgaagcccaaggatgtggccgttcctttgctgagtattctagcctccgaaaacatctggtggttcactcaggagagaagcctcatcagtgccaagtctgtgggaagaccttctctcagagtggaagcaggaatgtgcatatgagaaagcatcacctgcagctgggagcagctgggagtcaagagcaggagcaaactgctgagccactaatgggcagtagtttgcttgaagaggcttcagtacccagtaaaaacctggtgtctatgaattcccagcccagccttggtggagagtccttgaacctaccaaataccaattctatcctgggagttgatgatgaggtgcttgctgaaggatccccacgttccctgtcttcagtgcctgatgtgacacatcacctggtgaccatgcagtcagggaggcaatcatatgaagtttctgtcttaactgcagtaaatccacaagagttactaaaccaaggagatttaactgaaagacggacatgagcgtgggtgctgactcctggaagagcaactctatctgatctcaaaatgcgtatactgggaacaggatgccttagcccacaacagaaccagaatgaatctttgaaggcacaagactctgcttttgccactcttcctctttcctggtatagaagatggatgtaggagagcttcttttctaactaccatctgatcagacaaggaatgaagcaatgactgtgggctgggaaactgtacctacctctcttcccactgcaaatttctgggatagaccaaaagtgaatttgattatgtgttggctgaagttcttcattctgactgttgaggggaggttttcctttgaagagttttcatcccagactcagctgtcttttcacatggatgaaataattcctgctaccaacaacagagcttcaccaggaagttgagttttcaagatgccttgttgctttgaagaagggagtgatgtcaattctcttgttacattctccctttagcaacctgagtaagagactctctgccactgggctgcaaaaaaataaattacttgaatctccccttgaaaaaaaaaaaaaaaaaaaaaaaaaaaaa

SEQ ID NO: 122 - DNA, 2274 bp, Homo sapiens
ggagactcacaccttagattctgagtttttaagcttgtttcctcagagcagggaactcacgaacgtttcgtgagcacctacggtatgcagggtacggtgcggagccctagcgtcactgacgaccgggacagccgagcagctgcaggatccgtcgtgttccccagcaattttaatatttaaaaattcgttactgttgctgttacttgttttctatgtattggatgtcttcgtgaagaaccctcaaaagtgcaacgaactcctccctgccagagggcggccgcgcgctctgagtacagcttcccgcggagccggccaggtcctccagggcaccgagaaagccggccagaacggcggcgccctatcccggccgcagcgatgtctgacggcgccccggaactgacggtctggtacgcaggggcgctcggcggcaacggcggctttaaacgtcatcgcgggcgcgacgcctgagggacagtctggggtttggctgtccggacggtgcagcggcgaggccggccgcgaagatgccagtggcggtgatggcggaaagcgcctttagtttcaaaaagttgctggatcagtgcgagaaccaggagctcgaggcccctggaggaattgctacacccccagtgtatggtcagcttctagctttatatttgctccataatgacatgaataatgcaagatatctttggaaaagaataccacctgctataaaatctgcaaattctgaacttgggggaatttggtcagtaggacaaagaatctggcagagagatttccctgggatctatacaaccatcaacgctcaccagtggtctgagacggtccagccaattatggaagcacttagagatgcaacaaggagacgcgcctttgccctggtctctcaagcgtatacttcaatcatcgccgatgattttgcagcctttgttggacttcctgtagaagaggctgtgaaaggcatattagaacaaggatggcaagctgattccaccacaagaatggttctgcccagaaagccagttgcaggggccctggatgtttcctttaacaagtttattcccttatcagagcctgctccagttcccccaatacccaatgaacagcagttagccagactgacggattatgtggctttccttgaaaactgatttatcactctgagttcaagattcatcttcagaatcctgtatactgacaaacgtagaaatgtaaagtttgtattttcaatttattggatggcttaagcacctcagcattccttactatgtgataaaatacatatagaatataagatatactatatacattttgtccataaacgttatgctgaatagttgttgaaacagttctcattttgtagtatttaataatctggatggagcctgtcagtattacagttagttttctagtgactcataaaataagatttcctgtttcatgtagaatagtgtttgtcaactgtcttttctctgtcccagcacatgccgtactcttatatgtaccattggttgataattataatgattcatttggacttgaagaaagattgtccccaggcacagtatctgaatcactggggattatgattcaccctctttggagaacatgctctcttttcaccccccacctcctgagagccactaatgtaagatacagaaacatagctgaggaacaaatagaccatttccatactaaaccagtttgttaactttagattttttccaatagtgtgagtatatccattgctggcagtggagggcttgccatgaaaatgcaacttatttaagacatttatgagacatattaacttgtgctgtcgccttttagaaggagaaacttaagtgtggaatgcattatatgggcaaagaagctatgaagatacatgatacactttgtacaactatcctgcagcccattggttgcttatatttatcgcttggctcaagttctgccctttggagaaatactgagcaagtctttcattctctgtgtgacagccctctgaatatttgaagttgtttgttgtaacttaaggttataacagcccttagttcatttactctgcatttgttcaataaatatttaactgaattcttcaattatttcatctaagatagtttctggaaatttcactctcgatctttctgtggacacaatctattttgtcattgtgtctatatgaatctcttaagtagaaatgagttgtatggtgaatctgtgtagtgataattatataatttatttattttgaaaaaaaaaaaaaaaaaa

SEQ ID NO: 123 - DNA, 1488 bp, Homo sapiens
atggtaacgtggctttacagatttttacccacttcaaatatggccgccaagctccgttctcttttaccgcctgatctacggctacaattctggcttcatgcccgcctccaaaagtgcttcctctcgaggggttgtggttcttactgcgcaggcgcaaaagcaagtcctcttccgggcaaaatggcgatgggactaatgtgcggacgccgggagcttctgcgcttgctacagtccgggcgtcgggtccacagcgtcgcagggccctcgcaatggcttgggaaaccgctgaccacacggctcctattcccagtagccccgtgctgctgtcgcccacactacctcttccttgcggcttccggcccccgcagcctcagtacctctgctatctcttttgcagaagtccaggttcaggcccctcctgttgttgctgcaactccctcacccacagcagtacctgaggtggcttctggagagactgcagatgtagtccaaactgctgcagagcagagcttcgctgaactggggctggggtcatacaccccagtgggactgatccagaatttactggaatttatgcatgttgatctgggcctaccttggtggggggccattgctgcatgtacagtctttgcccgctgcctgatttttcctctcatcgtgacgggccagcgagaggcagccaggatccacaatcacttgccagagatccagaagttttccagtcgaatcagagaggccaagttagcaggagaccatattgagtattacaaggcttcctcggagatggcactttaccagaaaaaacatggtattaaactctataaacctctcattctccctgtgactcaggccccaatcttcatctccttcttcattgctttgagagagatggccaaccttcctgtgcccagcctgcagacaggtggcctctggtggttccaggatctcacggtatccgatcccatctacatattaccactggcagtcactgctacaatgtgggctgttcttgagctaggtgctgagacaggtgtgcaaagttctgaccttcagtggatgagaaatgtcatcagaatgatgcccctgataaccttgcccataaccatgcatttccccacggcagtgtttatgtactggctctcctccaatttgttttccctggtccaagtatcctgtctccggattccagcagtacgcactgtacttaaaatcccccagcgtgttgtacatgacctggacaaattacctccacgggaaggcttcctagagagcttcaaaaaaggctggaaaaatgctgaaatgacgcgtcagctgcgagagcgtgaacaacgcatgcggaatcagttggagctagcagccaggggtcctttacgacagacctttacccacaaccctctcctacaacctggaaaggataaccctcccaatatccctagcagcagcagcaaaccaaagtcaaagtatccctggcacgacacacttggctga

SEQ ID NO: 124 - DNA, 4022 bp, Homo sapiens
agcgggtctctcgctgtcgccggagtcccaggtctgtcttcactgctctgtgtcctctgctcctagaggcccagcctctgtggcgctgttaccagcaggtattggagatccacagctaagatgccaggaccccctagaagcctagaaatgggactgttgacatttagggatgtggccatagaattctctctggaggagtggcaacacctggacattgcacagcagaatttatatagaaatgtgatgttagagaactacagaaacctggccttcctgggtattgctgtctctaagccagacctgatcacctgtctggaacaagggaaagagccctggaatatgaagcgacatgagatggtggatgaacccccaggtatgtgtcctcattttgctcaaggcctttggccagagcagggcatggaagattcttttcaaaaagcaatactgagaagatatggaaaatatggacatgagaatttacagttaagaaaaggctgtaaaagtgtggatgagtataaggtgaacaaagaaggttataatggacttaaccagtgtttcacaactgcccagagcaaagtatttcaatgtgataaatatttgaaagtcttctataaatttttaaattcaaacagacctaagataagacatactgaaaagaaatctttcaaatgtaaaaaacgtgtcaaattattttgcatgctttcacataaaacccaacacaaaagcatttatcatagagagaagtcctacaaatgtaaagaatgtggaaaaacctttaattggtcctcaacccttactaatcataggaaaatttatactgaagagaaaccttacaaatgtgaagaatataacaaatctcctaagcaactctcaacccttactacacatgaaataattcatgctggagagaaactctacaaatgtgaagaatgtggtgaagcttttaatcgatcctcaaatcttactacacataagataattcatactggagagaaaccttacaagtgtgaagaatgtggcaaagcatttatctggtcctcaacccttactgagcataagaaaattcatactagaaagaaaccctacaagtgtgaagaatgtggcaaagcatttatatggtcctcaacactaactagacataagaggatgcacactggagagaaaccctacaaatgtgaagaatgtggcaaagcttttagccagtcctcaacccttactacacataagataattcatactggagagaaacgctacaaatgcttagaatgtggcaaagcttttaagcaactctcaactcttactacacataaaataattcatgttggagagaaactctacaaatgtgaagaatgcggcaaaggttttaatcgatcttcaaatcttactacacataagataattcatactggagagaaaccttacaagtgtgaagaatgtggcaaagcatttatctggtcctcaacgcttactaaacataagagaattcatactagagagaaaccctacaaatgtgaagaatgtggcaaggcatttatatggtcctcaaccctaactagacataagaggatgcacactggagagaaaccctacaaatgtgaagaatgtggcaaatcttttagccaatcctcaacccttactacacataagataattcatactggagagaaaccctacaaatgtgaagaatgtggcaaagcctttaactggtcctcaactcttactaaacataacataattcatactgaagagaaaccctacaaatgtgaaaaatgtggcaaagcctttaagcagtcttcaatccttactaaccataagagaattcatactggagagaaaccctataaatgtgaagaatgtggcaaatcttttaaccggtcttcaacttttactaaacataaggtaattcatactggagtaaaaccctacaaatgtgaagaatgtggcaaagcatttttctggtcctcaaccctaactaaacataagagaattcatactggagagcaaccctacaaatgggaaaaatttggcaaagcctttaatcggtcctcgcacctcaccacagataagataactcattggagagaaatcttacaagtatgaataatgtgccaaagcctaagaaaaccctcaattcttaatagatataagattattcctactggagagaaactacaaacctgagagaggcgctaatgcttttgacagtacctaaaactttaaagaaaatcattctgctgaaaaatcctagaaatgtgaagaatgtgaaaaagcctttaaatgattgtcacacttgattgtaggtaagataattcatactggagaaaactaccagtgtgaacaacgtggccaagcttcgacaatgctcacaccctattgcacaggaaagcatttatacttgagaagaaatgtacaaatattggcaaagtaaaaaatccattaacacctgctcacatcttactcaaaattgtagagttcatagtaaataaaagcattaaaattctaattactctcagaagatctgtcagaaagtatgtctttaaagtatagaagagcatttattttgaaaaaaacattacacatatgaagaggattgtaatatctttacttgtaccacagatcttattgtacacattttatactagagaaaaaccctcaggcagttgttaaaattttgttgaacatcagggagtttaagaaaaccctgcaagtataatgaatttggaaaaacattttttcaaaaactacaaattataaaacaccaaagtgttcatactaaaatatatttttgcagatacattaaatatgaaagatattcaatccaaaattaagtctatgtaaatatcagggaataattcacagtagaaatatctagggcattcaagctttagacattacactaaatcagagtgctgagtatagaaaataatacaaacagatttgtctaaacatttgtatataactttaaaaatagaatattttttggagggttataattacattcaaagtacttttttttgaaaatacagattttttttaaaagtgaataatgtgttcaactcttaaattcatgctgtttcatcattgctggtgtattcatatgtgaaagcatgtgactaattgctgcataaaagatatgagattcttttttattaggcattatttatgaccttttctatgaaaagataaggacattaaaatgtaagatgcgtgaggaaaatttaggtagagaggctctttgtggttaacttataatattgagtgatgcatgaggtaggtgttcagaataatattcctctgcattattatgaatgaaaagcattcttaattttagttaaaattaagttagtcatatgttattttattaattgtacttctatgaaataatatgcagtctatttttaaattataaattatgtgtgaacttagcttttcaattcaacatttttaacatattaaatactattgtgaattcaatgaagtgttcttatgccactaactttaacctattcccttactcaaggatgtaggtaaaagatggtaacaatacactatttggtaagataatgtactgacatctctagcaatcttttttgccagtggctttaaattgccaataagttaaagaatattgttcctatgggttaaatttttattcttattttcacatttaaatttatttttcttaatttttgtggatacataatatgtgtatatatgtatgccatatatggtatattttgatgcaggcatactctatataataatcacattagaggaaatgagatatccattacctctagcatttattctttttattacaagcaattcaattgtacacttttagttatttttaaatttacaatgttattgattacagggtcatttttatggtcataataaaaaattttatacaaacgtgtaaaatctatacatttctgagttctgaataaatatttttaaaaattttaaaaaaaaaaaaaaaaaaaaaaaaaaaaaaaaaaaaaaaagaaaaaaaaaaaaaa

SEQ ID NO: 125 - DNA, 2365 bp, Homo sapiens
aggctgtgctgcgggcagccagtgagaaggccgtcaagatggcggcctcctggaggctgggctgtgatccgcggctgctgcgttatcttgtgggcttccctggccgccgaagcgtagggctggtgaagggggctcttgggtggtctgtaagccgcggacgtaattggagatggtttcacagcacgcagtggcttcggggtgatcccattaagatactaatgccatcactgtctcctacaatggaagaaggaaacattgtgaaatggctgaaaaaggaaggtgaagcggtgagtgctggagatgcattatgtgaaattgagactgacaaagctgtggttaccttagatgcaagtgatgatggaatcttggccaaaatcgtggttgaagaaggaagtaaaaatatacggctaggttcactaattggtttgatagtagaagaaggagaagattggaaacatgttgaaattcccaaagacgtaggtcctccaccaccagtttcaaaaccttcagagcctcgcccctcaccagaaccacagatttccatccctgtcaagaaggaacacatacccgggacactacggttccgtttaagtccagctgcccgcaatattctggaaaaacactcactggatgctagccagggcacagccactggccctcgggggatattcactaaagaggatgctctcaaacttgtccagttgaaacaaacgggcaagattaccgagtccagaccaactccagcccccacagccactcccacagcaccttcgcccctacaggccacagctggaccatcttatccccggcctgtgatcccaccagtatcaactcctggacaacccaatgcagtgggcacattcactgaaatccccgccagcaatattcgaagagtcattgccaagagattaactgaatctaaaagtactgtacctcatgcatatgctactgctgactgtgaccttggagctgttttaaaagttaggcaagatctggtcaaagatgacattaaagtatcagtaaatgattttatcatcaaggcagcagctgttacccttaaacaaatgccagatgttaatgtaagctgggatggagagggcccaaagcaactgccatttattgacatttcagtggctgtggcaacagataaaggcttacttactccaatcataaaagatgctgctgctaaaggtatccaggaaattgctgactctgtaaaggctctatcaaagaaagcaagagatggaaaattgttgcctgaagaataccaaggaggatcttttagtatttccaacttggggatgtttggcatcgacgaatttactgcagtgattaaccctcctcaggcctgcattttggcggttgggaggttccgacctgtgctgaagctcactgaggatgaagagggaaatgccaaactgcagcagcgccagctcataacagtcacaatgtcaagtgacagtcgagtggttgatgacgaactggcaaccaggtttcttaaaagttttaaagcaaacctagagaatcctatccgacttgcctagtcctcaaagataagaagttggtgttcagcttagttgattcagtagttgttaccaagaaacatatgttataggaaaacaacttggtatttaagtatgaagtggatgaaatgtttatttatttaaggtgaaagcatttgacccagggtgtcttcatcttcaatttgggtttaatgttatagaaataaatgatgataaactctaactaataaaggaaagagaatatttggttactcagatccatttttaacctctggtgctgtataaagggaatattaaactagatgtaaatcaaagtatatgtttggctcatttgagcattttggaatatttgagaatgtatgatacatgtaaaattaaaaaaactattagaactgtaccataattatgttgaaggtagaagtgatcttcaaagagatggccattaacttagcagtgggacctcacttttacaagcactgctctagatatacttgaagaatttaataggtacagaagtttattctggataataaataaataaggatcacactgtattaggggttatggcaacattattgaattttttatgtacataaagccatatgtttagggtggtttctatctgtcttgtttttcacttatataacactgtgaacttctaaagcaagaggataaaagaagcatgaatgaaaagaatgacatttcaaaaaaatggttcaatgaaaaactatagctaaaatatgtaaacctttctaggtaaaccgcttgccttcatcttgagtcggaatatatttaaataaattgtgttatctcttgccaaaaaaaaaaaaaaaaaaaaaaaa

SEQ ID NO: 126 - DNA, 2669 bp, Homo sapiens
aaaagagtctcgccggcgtccccgcccgcacactcgcgcacactcgcgctcgggcgcacacggagcagggaccggcgcccggagcgagccagggagcggctaaccggggacccaccgcgcggagccagcctagctgccagcgagcccaacccgcgacgacccacgcccctgagccccgcagccgacccctgccggccggtgtccccaccgccatccctgacccatggcgctgaagaggattcagaaagaattgagtgatctacagcgcgatccacctgctcactgttcagctggacctgtgggagatgacttgttccactggcaagccactattatggggcctcctgatagcgcatatcaaggtggagtcttctttctcactgtacattttccgacagattatccttttaaaccaccaaagattgctttcacaacaaaaatttaccatccaaacataaacagtaatggaagtatttgtctcgatattctgaggtcacaatggtcaccagctctgactgtatcaaaagttttattgtccatatgttctctactttgtgatcctaatccagatgaccccttagtaccagatattgcacaaatctataaatcagacaaagaaaaatacaacagacatgcaagagaatggactcagaaatatgcaatgtaaaaatcaaaaacattttcatatataccagagtactgtaaaatctaggtttttttcaacattagcagtaaattgagcactgtttactgtttcattgtaccatgaaaccatttgatttttacccattttaaatgtgtttctgaagcaagacaaaacaaacttccaaaaatacccttaagactgtgatgagagcatttatcattttgtatgcattgagaaagacatttattatggtttttaagatacttggacatctgcatcttcagcttacaagatctacaatgcagctgaaaagcaaccaaattattttttgctgaaactagatgtttttacatgagaaatactgtatgtgttgtctaagatgtcagttttataaatctgtattcagatttcattctttgttagctcactttataatttgtatttttttactgtatagactaaatatattctatttacatgtatgtcaactcattacttttttcctgtgaacagtattgaaaaaccccaacggctgataattaagtgaattaactgtgtctcccttgtcttaggatattctgtagattgattgcagatttcttaaatctgaaatgatctttacactgtaattctcagcatactgattatggagaaacacttgttttgattttgttatacttgacttaactttattgcaatgtgaattaattgcactgctaagtaggaagatgtgtaacttttatttgttgctattcacatttgaattttttcctgtataggcaatattatattgacaccttttacagatcttactgtagctttttccatataaataaaatgctttttctactatttgtcttgattacttaaaaaaataaaaatataagtaaggatcaaaactctaaaattttgcatgaaaattacatccaaattgtgaaaatcagatctattttgtttgccattagtcaccattagttatataaattttattgttttaggttagtatctctttactaaattgtcagtctataagataatatatgttgatcccttgctgtagaggagaatttagagtaatttggggtttgtcttggattatatctaaatggattatttgttaaaagtactgaaatgagtataaggcagtatcacccatccaaaagaaaggtctttatagacctgcacagtcactagattaattcattaaaatgcccccaccctgatgtaattgacattacatttcttaacattttaaaatctagaatttctaaaatggaatttaatgccatcacaatttgaaaaactttttttttttttttactatagaagttacaaaggaagttctaaaattatgcctccctctgtttttataagttgccatcgaaaagtgatttaaataagcaggttatctttatagattttaaagaaaactagaaagttttaatgttttaacttggggaaaaatacatctctttaatgtttagcatgcttgtcaaccttgagtgagtgtcatttttaagaacagttgtagcccttctgattattgcagtagctgtagaagtatgtaagaatatgtgatgggtgtagtcattagcaaagcatttaaatcacttgagtattttgtcatggttcattattattaaagcacaaaataacctattgttagaaaatatgtgtttttataaatgaatgtaaaataattaaatgaattgtgaaatggatgtttaagaaaatataggcttaaaaagtaaatctataaaatgatgtcttaaaacagccatatcatgaaaaattctacttagctatattattataagctacatttgccctgaatttgaacactcaacatcactagatttaaatatttagtatattttgatagtaaagggttttgtttcttgaatatcttcactttaaacaaaaaaaaaaaacaactttcatttgtgtggcatttatttttggaagtgtcttcttttttttctttattaaagtttttgaaacttgcaaaaaaaaaaaaaaaaaa

SEQ ID NO: 127 - DNA, 3557 bp, Homo sapiens
cgcgccggttgccgctgcggagcgcggcgggtccatgtgcgcagtgagtggcgctattcctggcccagtagcacccgagccccgggtttgaccgagtccgcgctgcgatggaccccaacaccattatcgaggccctgcggggcaccatggacccagccctgcgtgaggccgcggagcgccagctcaatgaagcacacaagtctctgaattttgtctcaacactgctccagattactatgtcggaacagctggatttacctgtgagacaggcaggtgttatctatctgaaaaatatgataacacagtattggcctgatcgagaaacagcaccaggggatatatccccttatactattccagaagaagatcgccattgtattcgagaaaatattgtagaagccattatccattctcctgagctcatcagggtacagcttactacatgcattcatcacatcatcaaacatgattatccaagccgctggactgccattgtggacaaaattggcttttatcttcagtccgataacagtgcttgttggctaggaattcttctttgcctttatcagcttgtgaaaaattatgagtataaaaaaccagaggagcggagtccattggtagcagcaatgcagcattttctgccagttctaaaggatcgttttatccagcttctttctgaccagtctgatcagtctgtcctcatccagaaacagatattcaagatcttctatgctcttgttcagtatacactaccactggaactgataaaccaacagaacctgacagaatggatagaaattttaaagactgttgtgaacagggatgtacctaatgaaacacttcaagttgaagaagatgatcgacctgagttaccatggtggaaatgcaagaagtgggccttacatattttagcaagactttttgaaagatatggaagccctggcaatgtttccaaggagtataatgaatttgctgaagtatttctgaaggcatttgctgttggtgtccagcaagttttattgaaggtgttatatcagtacaaggagaagcaatatatggctcctcgagttttacaacagacattaaattatattaatcaaggagtttctcatgctctcacctggaagaatctgaagccccatatacaaggcattatccaagatgttatttttccattgatgtgctatacagatgctgatgaggaactttggcaagaagacccttacgaatatatacgcatgaagtttgatgtgtttgaagatttcatttctcctaccactgctgcccagacacttttgtttacagcctgtagtaagaggaaagaggtactgcaaaagactatgggattttgttaccagattcttacagaaccaaatgctgaccctcgaaaaaaagatggagccctgcatatgattggctctttagctgaaatacttctgaagaaaaagatctataaagatcagatggaatacatgttgcagaatcatgtattccctctcttcagcagtgaactaggctacatgagagcaagggcttgctgggtacttcactatttttgtgaagtgaagttcaaaagtgatcagaaccttcaaacagccttagagctaacaagaagatgtctgattgatgatagagaaatgcctgtgaaagtggaagctgccattgcccttcaagtattgatcagcaatcaagaaaaagctaaagaatatatcacaccattcatcagacctgtaatgcaggctcttcttcacattataagagaaacagaaaatgatgaccttaccaatgtaattcagaaaatgatctgtgaatatagtgaagaagttactcctattgcagtagaaatgacacaacatttggcaatgacatttaaccaagtaatccagacggggccagatgaagaaggtagtgatgacaaagcagttactgctatgggaattctgaatacaattgatacacttcttagtgtagttgaagatcataaagagataacccaacagcttgagggaatctgcttacaggtcattggtactgttttacaacagcatgtcttagaattctatgaggagatcttctctttagcgcacagtttgacatgtcaacaagtgtctccacagatgtggcagctactaccccttgtatttgaagtctttcagcaagatggctttgattactttacagatatgatgcccctccttcataattatgtaacagttgatacagacacacttctgtctgacaccaagtatcttgaaatgatatacagtatgtgcaaaaaggttcttacaggagttgcaggagaagatgcagagtgtcatgcagcaaaattgttagaggtcatcattctgcagtgcaaagggcgtggcattgaccagtgcattcccttattcgtggaagcagccttagaaagactgacaagagaggttaagacaagtgaacttcgaactatgtgtctgcaagttgcaattgcagctttgtattataatccacacctactactcaataccttagaaaatcttcgcttccctaataatgttgaaccagttacaaatcattttattacacagtggcttaatgatgttgactgtttcttggggcttcatgacagaaagatgtgtgttctcggactctgtgctcttattgatatggaacagataccccaagttttaaatcaggtttctggacagattttgccggcttttatccttttatttaacggattgaaaagagcatatgcctgccatgcagaacatgagaatgacagtgatgatgatgatgaagctgaagatgatgatgaaaccgaggaactggggagtgatgaagatgatattgatgaagatgggcaagaatatttggagattctggctaagcaggctggtgaagatggagatgatgaagattgggaagaagatgatgctgaagagactgctctggaaggctattccacaatcattgatgatgaagataaccctgttgatgagtatcagatatttaaagctatctttcaaactattcaaaatcgtaatcctgtgtggtatcaggcactgactcacggtcttaatgaagaacaaagaaaacagttacaggacatagcaactctggctgatcaaagaagagcagcccatgaatccaaaatgattgagaagcatggaggatacaaattcagtgctccagttgtgccaagttctttcaattttggaggcccagcaccagggatgaattgagttatctctttctttcctgctgtgtgcttgtagtgaagagcttgtgttcctcctagtagtggttccagaactggttcatgttatctattctaaactaataatcaatagatggacaaaagaaacaacaaccccaggagatgggacctgatcatgcaacctggcactggaaaagaaatcagcgggattttgggggtgggggggatgggaggtaccttagagggagtattttctttattttttgaagaaagtaagatcctgactctgaagcttcaaagtgacactgtggaaatctgaaacgaggggatgtcatgaaggcagcttttctttttctga

SEQ ID NO: 128 - DNA, 2328 bp, Homo sapiens
cggggcgccgctgagccaagtgggccacccgggcacggccacgctcccgggtcacgtgacacggagggggccgaattctgctggaggcagcgccatatcctggaggtgaaggtaccacctcatggagacccccgcggccgccgcccccgctgggagcttattcccctccttcctgctcctggcctgcgggacgctggtggccgccttgctgggcgccgctcaccgcctggggctcttctatcagctgctgcacaaggtggacaaggcaagcgtccggcatggcggagagaacgtggccgctgtgctgagggcccatggtgtgcggttcatcttcacgctggtcggtgggcacatttccccgctgctggtggcctgtgagaaactgggcatccgtgtggtggacacacgccatgaggtcacggccgtctttgctgctgatgctatggcccgcctgtccgggacggtgggcgtggcggcagtgacagcaggccctggcctcaccaacacggtgactgcggtgaagaatgctcagatggctcagtccccaatcctgcttctgggtggggctgccagcactctgctgcagaaccggggtgcgctccaggctgttgatcagctgtcccttttccggccactctgtaagttttgtgtgtctgtgcggagggtgcgggacattgtgcccaccctgagggccgcgatggctgccgcccagtcgggcaccccaggtccggtgtttgtggagctgcccgttgacgtgctgtacccctacttcatggtccagaaggagatggtgccagccaagccacccaagggcctcgtgggccgagtggtctcctggtatttagagaattacctggccaacctctttgcaggagcctgggagcctcagcccgagggaccgctgcccctggacatcccccaggcttccccgcagcaggttcagcgctgtgtggagatcctgagccgggccaagaggcctctgatggtgctggggagtcaggccctgctcaccccaacgtctgccgacaagcttcgggctgccgtggagaccttgggtgttccctgcttccttggagggatggcacgggggctgttaggccgcaaccaccccctccacatccgggagaaccgcagtgcggccctgaagaaggcggatgtcattgtcctagcaggaactgtgtgtgacttccgcctatcctatggccgtgtcctcagccacagcagcaagatcatcatcgtcaatcgtaatcgggaagagatgttgctcaactcagacatcttctggaagccccaggaggctgtgcagggagatgtgggttccttcgtgctgaagttagtggagggccttcagggccagacctgggccccagactgggtggaggagctgcgggaagccgaccggcagaaggagcagacctttcgggagaaggcagcgatgcctgtggcccagcacctgaacccagtgcaggtgctgcagctggtggaggaaacgctacctgacaactcaattctggtggtggatggcggggacttcgtgggcactgctgcccatctggtacagccccgcggccccctgcgctggctcgatcctggggcctttgggactctgggagttggtgcaggatttgcacttggggccaagctgtgccggccagatgctgaggtctggtgcctgtttggggacggagcttttggctacagcctcatcgaatttgatacattcgtcagacacaagatcccagtgatggccttggtagggaatgatgctggctggacacagatttctcgggagcaggtgccctctctgggcagcaacgtggcctgtggcctggcctacactgattatcacaaggcagccatgggtctgggggcccggggcttgctgctctcacgggagaacgaggatcaggtggtcaaggtgctgcacgatgcccagcagcagtgccgagacggccacccggttgtggtcaacatcctcattgggaggacggacttccgcgatggctccattgctgtatagggccttgtgggtcaggacgcttggctgccttcctgcccctggactgtgtccagctggtttggagtctcatcattgcttgccctgggcctatcccatgaggcccagtgactccacaacctccctgaggaggggatggaggggtcaaatctcagagaggctctcttgtgagctcttggaccctcctcttcacggacccaactgtgccgtttgtcccctctcttatggagactgaataaaccacctctggcccatgtaggcccaagtactcagtctcagaaaaaaaaaaaaaaaaaaaaaaaaaaaaaaaa

SEQ ID NO: 129 - DNA, 3465 bp, Homo sapiens
ctcgcgccaggcgagtctccgcgtctccctcgcgaactcggtgaaaggaattggcgccgttcgacaccaggcggatccgctctgcagcacgaacccatctccagccgcagccgcagccgccgcccgggccgaggagcagccgcagcagccgccaccagtggccgagtgagcggagccgagtttgaggcagcgcctagcggtgaatcggggccctcaccatgagttcctcgcctgttaatgtaaaaaagctgaaggtgtcggagctgaaagaggagctcaagaagcgacgcctttctgacaagggtctcaaggccgagctcatggagcgactccaggctgcgctggacgacgaggaggccgggggccgccccgccatggagcccgggaacggcagcctagacctgggcggggattccgctgggcgctcgggagcaggcctcgagcaggaggccgcggccggcggcgatgaagaggaggaggaagaggaagaggaggaggaaggaatctccgctctggacggcgaccagatggagctaggagaggagaacggggccgcgggggcggccgactcgggcccgatggaggaggaggaggccgcctcggaagacgagaacggcgacgatcagggtttccaggaaggggaagatgagctcggggacgaagaggaaggcgcgggcgacgagaacgggcacggggagcagcagcctcaaccgccggcgacgcagcagcaacagccccaacagcagcgcggggccgccaaggaggccgcggggaagagcagcggccccacctcgctgttcgcggtgacggtggcgccgcccggggcgaggcagggccagcagcaggcgggaggggacggcaaaacagaacagaaaggcggagataaaaagaggggtgttaaaagaccacgagaagatcatggccgtggatattttgagtacattgaagagaacaagtatagcagagccaaatctcctcagccacctgttgaagaagaagatgaacacttcgatgacacagtggtttgtcttgatacttataattgtgatctacattttaaaatatcaagagatcgtctcagtgcttcttcccttacaatggagagttttgcttttctttgggctggaggaagagcatcctatggtgtgtcaaaaggcaaagtgtgttttgagatgaaggttacagagaagatcccagtaaggcatttatatacaaaagatattgacatacatgaagttcgtattggctggtcactaactacaagtggaatgttacttggtgaagaagaattttcttatgggtattctctaaaaggaataaaaacatgcaactgtgagactgaagattatggagaaaagtttgatgaaaatgatgtgattacatgttttgctaactttgaaagtgatgaagtagaactctcgtatgctaagaatggacaagatcttggcgttgccttcaaaatcagtaaggaagttcttgctggacggccactgttcccgcatgttctctgccacaactgtgcagttgaatttaattttggtcagaaggaaaagccatattttccaatacctgaagagtatactttcatccagaacgtccccttagaggatcgagttagaggaccaaaggggcctgaagagaagaaagattgtgaagttgtgatgatgattggcttgccaggagctggaaaaactacctgggttactaaacatgcagcagaaaatccagggaaatataacattcttggcacaaatactattatggataagatgatggtggcaggttttaagaagcaaatggcagatactggaaaactgaacacactgttgcagagagccccccagtgtcttgggaaatttattgagattgctgcccgaaagaagcgaaattttattctggatcagacaaatgtgtctgctgctgcccagaggagaaaaatgtgcctgtttgcaggcttccagcgaaaagctgttgtagtttgcccaaaagatgaagactataagcaaagaacacagaagaaagcagaagtagaggggaaagacctaccagaacatgcggtcctcaaaatgaaaggaaactttaccctcccagaggtagctgagtgctttgatgaaataacctatgttgaacttcagaaggaagaagcccaaaaactcttggagcaatataaggaagaaagcaaaaaggctcttccaccagaaaagaaacagaacactggctcaaagaaaagcaataaaaataagagtggcaagaaccagtttaacagaggtggtggccatagaggacgtggaggattcaatatgcgtggtggaaatttcagaggaggagcccctgggaatcgtggcggatataataggaggggcaacatgccacagagaggtggtggcggtggaggaagtggtggaatcggctatccataccctcgtgcccctgtttttcctggccgtggtagttactcaaacagagggaactacaacagaggtggaatgcccaacagagggaactacaaccagaacttcagaggacgaggaaacaatcgtggctacaaaaatcaatctcagggctacaaccagtggcagcagggtcaattctggggtcagaagccatggagtcagcattatcaccaaggatattattgaatacccaaataaaacgaactgatacatatttctccaaaaccttcacaagaagtcgactgttttctttagtaggctaactttttaaacattccacaagaggaagtgcctgcgggttccttttttagaagctttgtgggttgattttttttcttttcttttttgtacatttttaattgcagtttaaaagtgaatcgtaagagaacctcagcattgtgcacgataagagaatgtgtcagtatttcagggttctacattttatctgtaaaatgtgacttttttttttttttatcacaacagaagtaaaatgttgctttgtacctggtgtcttttattaagaatttactccccccatttctcacagagaataacagtcgggagtcattgtcacaatataatagaaatgttagcaaccagattcatgtaaggactaagtggtcctcatgaattgcattaagactctgtactgctcatattacactccatcctctctgtagtttgctgggtagtggagggggtaagctaaatcatagtttctgacaataactgggaaggttttttcttaaaataacaatggaattggtataattgggattgaaaactaaaacttggaactaagatagagaagatggagtgtatgtagaagggctgttaaaaatgtaaaacttggttgcattatttgtggaggctcaaacttgtgaaggttaataccataatttttccatttgttctgcattttgattctgaaaagaaagctggctttgcccatttcttattaaaaaaacttgttgtaaaaaaaaaaaaaaaaaaaaaaaaaaaaaaaaaaaaa

SEQ ID NO: 130 - DNA, 1522 bp, Homo sapiens
caggtgtggattccgccggtgaaggctgaaggcagctaccttaaagatgccgggatccgcagcgaagggctcggagttgtcagagaggatcgagagcttcgtggagaccctgaagcggggtggtgggccgcgcagctccgaggaaatggctcgggagaccctagggttgctgcgccagatcatcacggaccaccgctggagcaacgcgggggagctgatggagctgatccgcagagagggcaggaggatgacggccgctcagccctccgagaccaccgtgggcaacatggtgcggagagtgctcaagattatccgggaggagtatggcagactccatggacgcagcgacgagagtgatcagcaggagtccctgcacaaactgttgacatccggaggcctaaacgaggatttcagcttccattatgcccaactccagtccaacatcattgaggcgattaatgagctgctagtggagctggaagggacaatggagaacattgcagcccaggctctggagcacattcactccaatgaggtgatcatgaccattggcttctcccgaacagtagaggccttcctcaaagaggctgcccgaaagaggaaattccatgtcattgtagcagagtgtgctcctttctgccagggtcatgaaatggctgtgaatttgtccaaagcaggtattgagacaactgtcatgactgatgctgccatttttgccgttatgtcaagagtcaacaaggtgatcattggcacgaagaccatcctggccaatggggccctgagagctgtgacaggaactcacactctggcactggcagcaaaacaccattccaccccactcatcgtctgtgcacctatgttcaaactttctccacagttccccaatgaagaagactcatttcataagtttgtggctcctgaagaagtcctgccattcacagaaggggacattctggagaaggtcagcgtgcattgccctgtgtttgactacgttcccccagagctcattaccctctttatctccaacattggtgggaatgcaccttcctacatctaccgcctgatgagtgaactctaccatcctgatgatcatgttttatgaccgaccacacgtgtcctaagcagattgcttaggcagatacagaatgaagaggagacttgagtgttgctgctgaagcacatccttgcaatgtgggagtgcacaggagtccacctaaaaaaaaaatccttgatactgttgcctgcctttttagtcaccccgtaacaagggcacacatccagcactgtgtcttgcctttcagatcttaacagagcagcagggcttaacttgttgattttggagcctcttagtgacctggttgcgtctgtgtcaggaacttaaactttctggttcagtagtgtgttaaacataacactgaataccttactgggatacagatttttgctcagaaatggctatgacactttttctaggctctaccaataaaagccacttgaaggttcaaaaaaaaaaaaaaaaaaa

SEQ ID NO: 131 - DNA, 4285 bp, Homo sapiens
gaagacgcccggagcggctgctgcagccagtagcggccccttcaccggctgccccgctcagacctagtcgggaggggtgcgaggcatgcagctgggggcccagctccggtgccgcaccccgtaaagggctgatcttccacctcgccacctcagccacgggacgccaagaccgcatccaattcagacttcttttggtgcttgtgaaactgaacacaacaaaagtatggatatgggaaaccaacatccttctattagtaggcttcaggaaatccaaaaggaagtaaaaagtgtagaacagcaagttatcggcttcagtggtctgtcagatgacaagaattacaagaaactggagaggattctaacaaaacagctttttgaaatagactctgtagatactgaaggaaaaggagatattcagcaagctaggaagcgggcagcacaggagacagaacgtcttctcaaagagttggagcagaatgcaaaccacccacaccggattgaaatacagaacatttttgaggaagcccagtccctcgtgagagagaaaattgtgccattttataatggaggcaactgcgtaactgatgagtttgaagaaggcatccaagatatcattctgaggctgacacatgttaaaactggaggaaaaatctccttgcggaaagcaaggtatcacactttaaccaaaatctgtgcggtgcaagagataatcgaagactgcatgaaaaagcagccttccctgccgctttccgaggatgcacatccttccgttgccaaaatcaacttcgtgatgtgtgaggtgaacaaggcccgaggggtcctgattgcacttctgatgggtgtgaacaacaatgagacctgcaggcacttatcctgtgtgctctcggggctgatcgctgacctggatgctctagatgtgtgcggccggacagaaatcagaaattatcggagggaggtagtagaagatatcaacaaattattgaaatatctggatttggaagaggaagcagacacaactaaagcatttgacctgagacagaatcattccattttaaaaatagaaaaggtcctcaagagaatgagagaaataaaaaatgaacttctccaagcacaaaacccttctgaattgtacctgagctccaaaacagaattgcagggtttaattggacagttggatgaggtaagtcttgaaaaaaacccctgcatccgggaagccaggagaagagcagtgatcgaggtgcaaactctgatcacatatattgacttgaaggaggcccttgagaaaagaaagctgtttgcttgtgaggagcacccatcccataaagccgtctggaacgtccttggaaacttgtctgagatccagggagaagttctttcatttgatggaaatcgaaccgataagaactacatccggctggaagagctgctcaccaagcagctgctagccctggatgctgttgatccgcagggagaagagaagtgtaaggctgccaggaaacaagctgtgaggcttgcgcagaatattctcagctatctcgacctgaaatctgatgaatgggagtactgaaataccagagatctcacttttgatactgttttgcacttcatatgtgcttctatgtatagagagctttcagttcattgatttatacgtgcatatttcagtctcagtatttatgattgaagcaaattctattcagtatctgctgcttttgatgttgcaagacaaatatcattacagcacgttaacttttccattcggatcattatctgtatgatgtggtgtggtttgtttggtttgtccttttttttgcgtttttaatcagaaaacaaaatagaggcagcttttgtagattttaaatgggttgtgcaagcattaaaatgcaggtctttcagaatctagaactaggcataaccttacataatactaggaaaattatgagaaaggggaaatttttggttaaataagagtaaggttcaaacacaagcagtacatgttctgtttcattatgctcgatagaaggcttttttttcacttataaggcctgattggtcctacccagcttaacggggtggggtttttttgtttgttcagacagtctgttcttttgtaaacatttttagttggaaaaacagcatctgcattttccccatcctctacgttttagagaggaatcttgtttttgtgtgcaacataagaaaattatgaaaactaatagccaaaaaacctttgagattgcattaaagagaagggataaaggaccagcaataataccttgtaagttgcttttgtttgtaaaatctgagcttatagttttccttagtgagtaaattcataaggatgggaacatttaaattaagttaatgggcctttaaaaaaaaaaaaggaaacactcatacctgtagttggaggatgaatactggagacgggttaccaatgtcaggttatactaaaactaaatcagaaagtctgaatgtagcacataatggttctcttctgttgtccaaggctgtaaaatggacagccttgtcacacctccccggtgctgttttacaacgtgagggtagacgctgtcagtaacccagagggaccaggccttcctaggttttctaggcagtcagctgttaaccactcacttagtaaatgtcataactacacctgctccaggaccaatcagtgaaacctgctcggaattaaaggcttcctctgggtgcctgctgaacaactgagctcatgtcatgggcatgtggtggtttctctgttgcctgaaagagccattaaagtcagtcgtgcgtgaagcatctctcttctaaaggatgtgtatttccataaatgctttctgaggatccggtacaaaatgatttcccaaagttctgaagtgccttgagaacatgtgggtccgagtgttataacagactcctcccccgggtcaccttttgcctggtcatcctgttagagtacatctttggaaatccagggtaatattctctttcagagatgctcattgtgtaactctgtgtagggagatagtcactttaaacagctcaaagtagctagctaaaggagtagccttaaatacctaaaagatgacagaagcatagcccttaacaaatcttcagcttgtctctcagtatttcccaatcatgaaaatcccttgctatgtctttcctactagaaatgttctagaatcgctggacggtggggtcagagggcagtcggtatttaggccgtgagcttcccatactactgcaggtccaactcctggcaaccgcgggctcaaggcaggtcattggaatccacgttttggccacagtagttgtaggattgcttttctgtatcataattttagaatgctcttaaaatcttgaggaagagtttttattttttatttatttttgagatggagtctctgttgcccaggctgcagtgcagtggtgccatctcagctcactgcaacctccacctcccaggttcaagcgattctcctgcctcagccacctgagtagctgggagtacaggcatgtggcaccatgcctggctaatttttgtatttttaatagagttgagatttcaccatgatggtcaggctggtctcgaactcctgacctcgtgatccgcccgcctcggccccccaaagtgctgggattaacgggtgtgagccacggcgcccagcccaggaagagtttttaaattagagctctgtttaattataccactgggaaatcatggttacgcttcaggcatattcttccccagagtactacttacattttaaatttcattttgtaaagttaaatgtcagcattccctttaaaagtgtccattgttctttgaaagtagacgtttcagtcattcttttcaaacaagtgtttgtgtaccttttgccaagctgtgggcatcgtgtgtgagtacagggtgctcagctcttccaccgtcattttgaattgttcacatgggtaattggtcatggaaatgatcagattgaccttgattgactgtcaggcatggctttgtttctagtttcaatctgttctcgttccttgtaccggattattctactcctgcaatgaaccctgttgacaccggatttagctcttgtcggccttcgtggggagctgtttgtgttaatatgagctactgcatgtaattcttaaactgggcttgtcacattgtattgtatttttgtgatctgtaatgaaaagaatctgtactgcaagtaaaacctactccccaaaaatgtgtggctttgggtctgcattaaacgctgtagtccatgttcatgcc

SEQ ID NO: 132 - DNA, 2336 bp, Homo sapiens
ggcgatttcaactctcgaatgggaggaggcagtatagaggtatctgtgcctaggtttgctgtggggattgtaataggaagaaacggggaaatgatcaaaaagatccagaatgatgctggtgtgaggattcagtttaaaccagatgatgggattagtccagaaagagctgcccaggtcatgggccctccggatcggtgtcagcatgcagcgcatatcatcagcgagctgattcttacagcccaggaaagagacggctttggaggcctggcagcagccagaggaagaggtcgtggccgtggcgactggagcgtgggagcccctggtggcgtccaggagataacatacacggtgccagccgataagtgtggcctcgtcataggcaaagggggtgagaacatcaaaagcatcaaccagcagtcaggggcgcacgtggagcttcagaggaacccccctcccaacagcgaccccaacctgcggagattcaccatcaggggggttccccagcagatcgaggtggccaggcagctcatagatgagaaagttggcgggaccaatctcggagcacctggagccttcggacagagtccattcagccagccacctgccccacctcatcaaaatacctttcctccaaggagctccgggtgcttcccaaacatggctgccaaggtgaatgggaacccccacagcacccctgtgagtggtcctccggcctttctgacccagggctggggcagcacctaccaggcgtggcagcagcccacacagcaggtcccaagccagcagagccagccgcagagcagccagcccaactacagcaaggcctgggaagactattacaaaaaaacagagtcacgccgccagcgctgctcctcaggccagctccccaccagactacacaatggcctgggcagaatattacagacagcaggtcgctttctacggacagacgttagggcaggcgcaggcccacagccaggagcagtaggacagcgtcctcgtggccaactctcccctcaaaatcattgtcaaagaaaacctatttgtaacagaggtttttacatttgcaaaccttttgatgaagaactgttgttttgttctgtgaaacactatatttagattaacggaatttttctaaaaatcaggaaaattagttactaaaaattgctgatcatttttgtttcattatttttgttatttcaaatgtataagctctgggattctttttggagcaatacctacaaagtcaggcaccagaatgtgcctcagagctgtgacatttcaacatgatggttttggtttggtttggttttgtgtcctttttatttgcagttttttctgttgcaacagaaagtggcttggaagtcttaggtggtatgtaacaaattctttttaaaaattttaaagcagtatttaagtattcttaaatgtgtaaattcatttaatgttttacttctaatttcttgtatcttggctgtctggttttattgcatttttaaaaaaactgaactattatgtattgtaatgaatgatgtgaattctgaactgagacagataattgtattgctgtccaacaggggttgggaggggcattttgtagggtttgtataatttctagagttcgaaaggggtaatataaaaatgtgctcgtgtgtttagcctacgtttttctcatgcctccattaccagttgcaattgtgtatctaagacctccaagcttgtttttaaaacaaaacaaaaaacctttctctattatctcagaaatataaatactgttatttttaatattaagaaattcaatataacttttaacacacactgtggaacattaaaccgtataaaaatgtagttataactatttttaattccaaggtgttgtttgcttttttcttttaaatattttcttaatattttgtcagattaactagatgaataaataaatctagtattaaccgcattatgaattaaataattttgatttaatgaaagggataatatgatttccagtgtttactgtagtgtatcttgtacagataacatgtatttttaaaggaaaaaaaacggaattgaagctattttttcttgcatttctaattgacctgagggacattccgtttgaaatgtactgaagttacagtttctggttttttctccttatttttcttataatgcttgaaatgtctaactattaaaaaagacaattggaaaatgttatgcatggggtttttaagaaaacaaagtgttctttttatttgactgacaattcattttacactctatataataaaatctccacaaggcatcttgtgggcaaagtcaaaaaaaaaaaaaaaaaa

SEQ ID NO: 133 - DNA, 2963 bp, Homo sapiens
ggccgacccgagcagccggttccctcctctccaggccccctccccatcccacccccgccgcctggccccagccgacccgtcccttcgtctccccgcggaatggggccggcactgctcagggtcgcgcgccctggacccagctcgctctcggtctcgcgctgtcagcgactgcccggctcgcgccgcctcgcgctctgcctcagtcagtggcgccgaaggctccgttaagcggcggcggcggttcctgtttccgtttcttcctctccgttcggtcgggagtagcatcctccactcagccacccttcccactcccccatcgtggggcagctgcggctgagggctgtggctttggcagctgcgacggggagcggcggagaccgcctctgctcccgcctggggttgctgcttttgctcagaggacatccatgaccctaatggtctttttgttcaagataaagtgattttttgcctttgttgattaactggacaaattcaggataccagaaggccctattgatcaggggccagctataggaagagtacgcgttttagaagagcagcttgttaaggccaaagaacagattgaaaattacaagaaacagaccagaaatggtctggggaaggatcatgaaatcctgaggaggaggattgaaaatggagctaaagagctctggtttttcctacagagtgaattgaagaaattaaagaacttagaaggaaatgaactccaaagacatgcagatgaatttcttttggatttaggacatcatgaaaggattctgatggcaattactgtctcattagtgaacaataaaagaaaaattgttgtattagcacaacctactactgtgaagaggaaaagaattaccccatacaagtctataatgacggatctatactacctcagtcagacagatggagcaggtgattggcgggaaaaagaggccaaagatctgacagaactggttcagcggagaataacatatcttcagaatcccaaggactgcagcaaagccaaaaagctggtgtgtaatatcaacaaaggctgtggctatggctgtcagctccatcatgtggtctactgcttcatgattgcatatggcacccagcgaacactcatcttggaatctcagaattggcgctatgctactggtggatgggagactgtatttaggcctgtaagtgagacatgcacagacagatctggcatctccactggacactggtcaggtgaagtgaaggacaaaaatgttcaagtggtcgagcttcccattgtagacagtcttcatccccgtcctccatatttacccttggctgtaccagaagacctcgcagatcgacttgtacgagtgcatggtgaccctgcagtgtggtgggtgtctcagtttgtcaaatacttgatccgcccacagccttggctagaaaaagaaatagaagaagccaccaagaagcttggcttcaaacatccagttattggagtccatgtcagacgcacagacaaagtgggaacagaagctgccttccatcccattgaagagtacatggtgcatgttgaagaacattttcagcttcttgcacgcagaatgcaagtggacaaaaaaagagtgtatttggccacagatgacccttctttattaaaggaggcaaaaacaaagtaccccaattatgaatttattagtgataactctatttcctggtcagctggactgcacaatcgatacacagaaaattcacttcgtggagtgatcctggatatacattttctctctcaggcagacttcctagtgtgtactttttcatcccaggtctgtcgagttgcttatgaaattatgcaaacactacatcctgatgcctctgcaaacttccattctttagatgacatctactattttgggggccagaatgcccacaatcaaattgccatttatgctcaccaaccccgaactgcagatgaaattcccatggaacctggagatatcattggtgtggctggaaatcattgggatggctattctaaaggtgtcaacaggaaattgggaaggacgggcctatatccctcctacaaagttcgagagaagatagaaacggtcaagtaccccacatatcctgaggctgagaaataaagctcagatggaagagataaacgaccaaactcagttcgaccaaactcagttcaaaccatttcagccaaactgtagatgaagagggctctgatctaacaaaataaggttatatgagtagatactctcagcaccaagagcagctgggaactgacataggcttcaattggtggaattcctctttaacaagggctgcaatgccctcatacccatgcacagtacaataatgtactcacatataacatgcaaacaggttgttttctactttgcccctttcagtatgtccccataagacaaacactgccatattgtgtaatttaagtgacacagacattttgtgtgagacttaaaacatggtgcctatatctgagagacctgtgtgaactattgagaagatcggaacagctccttactctgaggaagttgattcttatttgatggtggtattgtgaccactgaattcactccagtcaacagattcagaatgagaatggacgtttggtttttttttgtttttgtttttgttttttcctttataaggttgtctgtttttttttttttaaataattgcatcagttcattgacctcatcattaataagtgaagaatacatcagaaaataaaatattcactctccattagaaaattttgtaaaacaatgccatgaacaaattctttagtactcaatgtttctggacattctctttgataacaaaaaataaattttaaaaaggaattttgtaaagtttctagaattttatatcattggatgatatgttgatcagccttatgtggaagaactgtgataaaaagaggagctttttagtttttcagcttaaaaaaa

SEQ ID NO: 134 - DNA, 4568 bp, Homo sapiens
gtgagaactaggagcctgtcctccatgttttataagtattgacattacacagtgttaacaatgcatccacagagcttggctgaagaggaaataaaaacagaacaggaggtggtagagggcatggatatctctactcgctccaaagatcctggctctgcagagagaacagcccagaaaagaaagttccccagccctccacattcttccaatggccactcgccgcaggacacatcaacaagccccattaaaaagaaaaagaaacctggcttactgaacagtaacaataaggagcagtcagaactaagacatggtccgttttactatatgaagcagccactcaccacagaccctgttgatgttgtaccgcaggatggacggaatgatttctactgctgggtttgtcaccgggaaggccaagtcctttgctgtgagctctgtccccgggtttatcacgctaagtgtctgagactgacatcggaaccagagggggactggttttgtcctgaatgtgagaaaattacagtagcagaatgcatcgagacccagagtaaagccatgacaatgctcaccattgaacagttatcctacctgctcaagtttgccattcagaaaatgaaacagccagggacagatgcattccagaagcccgttccattggaacagcaccctgactatgcggaatacatcttccatccaatggacctttgtacattggaaaagaatgcgaaaaagaaaatgtatggctgcacagaagccttcctggctgatgcaaagtggattttgcacaactgcatcatttataatgggggaaatcacaaattgacgcaaatagcgaaagtagtcatcaaaatctgtgaacatgagatgaatgaaatcgaagtatgtccagaatgttatctagctgcttgccaaaaacgagataactggttttgtgagccttgtagcaatccacatcctttggtctgggccaaactgaaggggtttccattctggcctgcaaaagctctaagggataaagacgggcaggtcgatgcccgattctttggacaacatgacagggcctgggttccaataaataattgctacctcatgtctaaagaaattcctttttctgtgaaaaagactaagagcatcttcaacagtgccatgcaagagatggaggtttacgtggagaacatccgcaggaagtttggggtttttaattactctccatttaggacaccctacacacccaacagccagtatcaaatgctgctcgatcccaccaaccccagcgccggcactgccaagatagacaagcaggagaaggtcaagctcaactttgacatgacggcatcccccaagatcctgatgagcaagcctgtgctgagtgggggcacaggccgccggatttccttgtcggatatgccgcgctcccccatgagcacaaactcttctgtgcacacgggctccgacgtggagcaggatgctgagaagaaggccacgtcgagccacttcagtgcgagcgaggagtccatggacttcctggataagagcacagcttcaccagcctccaccaagacgggacaagcagggagtttatccggcagcccaaagcccttctctcctcaactgtcagctcctatcacgacgaaaacggacaaaacctccaccaccggcagcatcctgaatcttaacctggatcgaagcaaagctgagatggatttgaaggagctgagcgagtcggtccagcaacagtccacccctgttcctctcatctctcccaagcgccagattcgtagcaggttccagctgaatcttgacaagaccatagagagttgcaaagcacaattaggcataaatgaaatctcggaagatgtctatacggccgtagagcacagcgattcggaggattctgagaagtcagatagtagcgatagtgagtatatcagtgatgatgagcagaagtctaagaacgagccagaagacacagaggacaaagaaggttgtcagatggacaaagagccatctgctgttaaaaaaaagcccaagcctacaaacccagtggagattaaagaggagctgaaaagcacgtcaccagccagcgagaaggcagaccctggagcagtcaaggacaaggccagccctgagcctgagaaggacttttccgaaaaggcaaaaccttcacctcaccccataaaggataaactgaagggaaaagatgagacggattccccaacagtccatttgggcctggactctgattcagagagcgaacttgtcatagatttaggagaagaccattctgggcgggagggtcgaaaaaataagaaggaacccaaagaaccatctcccaaacaggatgttgtaggtaaaactccaccatccacgacggtgggcagccattctcccccggaaacaccggtgctcacccgctcttccgcccaaacttccgcggctggcgccacagccaccaccagcacgtcctccacggtcaccgtcacggccccggcccccgccgccacaggaagcccagtgaaaaagcagaggccgcttttaccgaaggagactgccccggccgtgcagcgggtcgtgtggaactcatcaactgtccagcagaaggagatcacacagagcccatccacgtccaccatcaccctggtgaccagcacacagtcatcgcccctggtcaccagctcggggtccatgagcacccttgtgtcctcagtcaacgctgacctgcccatcgccactgcctcagctgatgtcgccgctgatattgccaagtacactagcaaaatgatggatgcaataaaaggaacaatgacagaaatatacaacgatctttctaaaaacactactggaagcacaatagctgagattcgcaggctgaggatcgagatagagaagctccagtggctgcaccagcaagagctctccgaaatgaaacacaacttagagctgaccatggcggagatgcggcagagcctggagcaggagcgggaccggctcatcgccgaggtgaagaagcagctggagttggagaagcagcaggcggtggatgagaccaagaagaagcagtggtgcgccaactgcaagaaggaggccatcttttactgctgttggaacactagctactgtgactacccctgccagcaagcccactggcctgagcacatgaagtcctgcacccagtcagctactgctcctcagcaggaagcggatgctgaggtgaacacagaaacactaaataagtcctcccaggggagctcctcgagcacacaatcagcaccttcagaaacggccagcgcctccaaagagaaggagacgtcagctgagaaaagcaaggagagtggctcgacccttgacctttctggctccagagagacgccctcctccattctcttaggctccaaccaaggctctgaccattcccggagtaataaatccagttggagcagcagtgatgagaagaggggatcgacacgttccgatcacaacaccagtaccagcacgaagagcctcctcccgaaagagtctcggctggacaccttctgggactagcagtgaatcgggacacaaaccacccaccccattgggagaaaaacccagacgccaggaaaagaagaaacaacaaaggcaggagaacagccactttcagacttgaaaatgacaaaaccctcagttgagcctgagcccccggcgcgggggctgctacactacaggacacccagcatcggctttgactgcagactgttcacccacacgagccctgtgcttttggtgtaaataatgtacaatttgtggatgtcattgaatctagaggactttcccctttttatatttgtattaactttaacttattaaaaaaaaaaaaagaaaaagaaaaacgatttaaaaaaaaaaaaaaaagcaaccaaccccaacaacaaaaaagaatgttttggtattggagaagggatggtcagttagcctgtctgtcacacgacggaatggatactgggcccggggaccactttcatactcacgtcctcatccttggatacccaggggagggcgaaccgttttcgctcgtgtgtctgtacgcagcatgttgggatcgggagtttcggcacagactatcccatcaagccgttggctcctttcagctactacgttaccacgttcctaaaacgcaagctctccggaccagacggacacagggagaagctagtttctttcatgtgattgaaatgatgactctactcctaaaagggaaaaaacaatatccttgtttacagaagagaaacaaacaagccccactcagctcagtcacaggagagaacacagaaagtcttaggatcatgaactctgaaaaaaagagaaaccttatctttgctttgtggttcctttaaacacactcacacacacttggtcagagatgctgtgcttcttggaagcaaggactcaaaggcaaggtgcacgcagaggacgtttgagtctgggatgaagcatgtacgtattatttatatgatggaatttcacgtttttatgtaagcatgaaacacaggcagtatgagagaaagcaaggcccgtcatgctgtccgtac

SEQ ID NO: 135 - DNA, 605 bp, Homo sapiens
gaagtggcccttgcaggcaagagtgctggagggcggcagcggcgaccggagcggtaggagcagcaatttatccgtgtgcagccccaaactggaaagaagatgctaattaaagtgaagacgctgaccggaaaggagattgagattgacattgaacctacagacaaggtggagcgaatcaaggagcgtgtggaggagaaagagggaatccccccacaacagcagaggctcatctacagtggcaagcagatgaatgatgagaagacagcagctgattacaagattttaggtggttcagtccttcacctggtgttggctctgagaggaggaggtggtcttaggcagtgatggaccctccattttacctctttaccctgtcgctcataatgaggcatcatatatcctctcactctctgggacaccatagccactgccccctcccctggatgcccagtaatgtatgtctactggtgggagactgtgaggatcccaggattcagtattcctggcccagagggccttgctggctactgggtgttagtttgcagtcctgtgtgcttccctctcttatgactgtgtccctggttgtcaataaaatatttcctggc

SEQ ID NO: 136 - DNA, 2148 bp, Homo sapiens
aagacaaacactttccttgactttgagaaataatttaagtcaaagaatctgctctatgctaaccaagagatagagcacagcaaagatctgccagccccaggcctctacctagtggcctggaaattcaagtattcttattggtggaggccatttgtttctgattagaagctgtctaaacctcctactcctcaactcaaaggaaaacacagagcataccatggccaagaaagttgcagtgattggagctggtgtgagtggcctctcctccatcaaatgctgtgtggatgaggacctggagcccacctgctttgagagaagtgatgacattgggggattatggaagtttactgaatcttccaaagatgggatgaccagggtctataagtcattagtgacaaatgtctgtaaggaaatgtcatgttacagtgacttccctttccacgaagattatcctaatttcatgaaccatgaaaaattttgggactatctccaagaatttgctgagcactttgacctcctgaaatacattcagtttaagaccactgtgtgcagcataacgaagcgtccagacttctccgaaactggtcagtgggatgttgtcacagagacagagggcaagcaaaatagagctgtctttgatgctgttatggtttgcactggacatttcctgaatccccatttacctttggaagcctttcctggaattcataagtttaaaggtcagatcctgcatagtcaagagtacaagatcccagaaggctttcagggcaaacgcgtcttggtgattggtcttgggaacactggaggagacattgctgtggaactcagtcgaacggcagctcaggtacttctcagtactagaactggtacctgggttcttgggcgctcttcagattggggctatccttataatatgatggttacaagaagatgctgtagttttattgcacaagttctgccttcacgttttctaaactggattcaagaaaggaagttgaataagagatttaatcatgaggattatggattaagtattaccaaagggaaaaaagcaaaattcattgtgaatgatgagctgccaaactgtatcctctgtggggcaatcactatgaaaaccagcgtgattgaatttacagaaacctctgctgtctttgaagatgggacagtggaagaaaacattgatgttgtgatcttcactacaggatatacattttcttttccattttttgaagaacctcttaaaagcctctgtacaaagaagatatttctatacaagcaagtctttcccttaaacctagagagagcgacattagccatcatcggccttatcggccttaaaggatccatcttatcaggcacagagctccaagcacgatgggtcacaagagtattcaaaggactctgtaagatacctccatcccaaaaattgatgatggaggctactgaaaaggaacagctcattaaaaggggagtgtttaaagacaccagcaaagacaaatttgactacattgcctacatggatgatatcgctgcctgcataggcacaaagcccagcatcccacttctgttcctcaaggatcccagactagcttgggaagttttctttggaccatgtactccttatcagtaccgcctcatgggccctggaaaatgggatggagccagaaatgccatcctgacccagtgggacagaacattgaaacctttaaaaactcgaattgtccctgattcctccaagcctgcctccatgtcacattatttaaaagcctggggggcacctgtcctacttgcctctcttctacttatctgtaaatcttcacttttcttgaaattggtgagagataaactacaggacagaatgtccccttacctagtaagtctttggcgaggatgaacctgattgttacaagggttacaccaagtcatgctaattctatctccaagtatcttgtgcatccctcctctgctctccatcataactgctattagccaaattcaggcccagtcatctcctatctgaattattgtattatcttcttctttgttttcagtaccctctttcttgccaccctttccaatgcatcttctaccctgctacctcagtgattattctaaaataaatatatatgatatggtttaaaaaaaaaa

SEQ ID NO: 137 - DNA, 2263 bp, Homo sapiens
aggaagtagggagcggggtggcaggggggggacccgccgcggctgctgccaccgccgccaccaccgcctctgctcgtggcgtgggaaaggaggtgtgagtcccgggcgcgagccgcggcggcgccgctgcgggagggtcggcggtgggaaggcgatggcggatttagataaactcaacatcgacagcattatccaacggctgctggaagtgagagggtccaagcctggtaagaatgtccagcttcaggagaatgaaatcagaggactgtgcttaaagtctcgtgaaatctttctcagtcagcctatcctactagaacttgaagcaccactcaaaatatgtggtgacatccatggacaatactatgatttgctgcgactttttgagtacggtggtttcccaccagaaagcaactacctgtttcttggggactatgtggacaggggaaagcagtcattggagacgatctgcctcttactggcctacaaaataaaatatcctgagaatttttttcttctcagagggaaccatgaatgtgccagcatcaacagaatttatggattttatgatgaatgtaaaagaagatacaacattaaactatggaaaactttcacagactgttttaactgtttaccgatagcagccatcgtggatgagaagatattctgctgtcatggaggtttatcaccagatcttcaatctatggagcagattcggcgaattatgcgaccaactgatgtaccagatcaaggtcttctttgtgatcttttgtggtctgaccccgataaagatgtcttaggctggggtgaaaatgacagaggagtgtccttcacatttggtgcagaagtggttgcaaaatttctccataagcatgatttggatcttatatgtagagcccatcaggtggttgaagatggatatgaattttttgcaaagaggcagttggtcactctgttttctgcgcccaattattgcggagagtttgacaatgcaggtgccatgatgagtgtggatgaaacactaatgtgttcttttcagattttaaagcctgcagagaaaaagaagccaaatgccacgagacctgtaacgcctccaaggggtatgatcacaaagcaagcaaagaaatagatgtcgttttgacactgcctagtcgggacttgtaacatagagtatataaccttcatttttaagactgtaatgtgtactggtcagcttgctcagatagatctgtgtttgtgggggcccttccttccatttttgatttagtgaatggcatttgctggttataacagcaaatgaaagactcttcactccaaaaagaaaagtgttttgttttttaattctctgttccttttgcaaacaattttaatgatggtgttaaagctgtacaccccaggacagtttatcctgtctgaggagtaagtgtacaattgatcttttttaattcagtacaacccataatcatgtaaatgctcattttctttaggacataaagagagccctagggtgctctgaatctgtacatgttcttgtcataaaatgcatactgttgatacaaaccactgtgaacattttttatttgagaattttgtttcaaagggattgctttttcctctcattgtcttgttatgtacaaactagtttttatagctatcaacattaggagtaactttcaaccttgccagcatcactggtatgatgtatatttaattaaagcacacttttccccgaccgtatacttaaaatgacaaagccattcttttaaatatttgtgactctttcctaaagccaaagtttctgttgaattatgttttgacacacccctaagtacaaggtggtatggttgtatacacatgctgccttcttggggattcaaaaacaggtttttgattttgaatagcaattagtgatatagtgctgtttaagctactaacgataaaaggtaataacattttatacaatttccatatagtctattcattaagtaatctttttacagttgcatcaggcctgaacccgtccattcagaaagcttcaaattatagaaacaatactgttctatacgagtgaccgattatgctttctttggcctacattctttattctgcggtgaagttgaggcttataagttaaaacaaaggaactaacttactgtccaccagtttatacagaactcacagtacctatgacttttttaaactaagatctgttaaaaaagaaatctgtttcaacagatgaccgtgtacaataccgtgtggtgaaaat

SEQ ID NO: 138 - DNA, 2497 bp, Homo sapiens
cattccatggtcccgcagccccaggcccacactgaaagcatgtcgatccaggagaacatatcatccctgcagcttcggtcatgggtctctaagtcccaaagagacttagcaaagtccatcctgattggggctccaggagggccagcggggtatctgcggcgggccagtgtggcccaactgacccaggagctgggcactgccttcttccagcagcagcagctgccagctgctatggcagacaccttcctggaacacctctgcctactggacattgactccgagcccgtggctgctcgcagtaccagcatcattgccaccatcgggccagcatctcgctccgtggagcgcctcaaggagatgatcaaggccgggatgaacattgcgcgactcaacttctcccacggctcccacgagtaccatgctgagtccatcgccaacgtccgggaggcggtggagagctttgcaggttccccactcagctaccggcccgtggccatcgccctggacaccaagggaccggagatccgcactgggatcctgcaggggggtccagagtcggaagtggagctggtgaagggctcccaggtgctggtgactgtggaccccgcgttccggacgcgggggaacgcgaacaccgtgtgggtggactaccccaatattgtccgggtcgtgccggtggggggccgcatctacattgacgacgggctcatctccctagtggtccagaaaatcggtccagagggactggtgacccaagtggagaacggcggcgtcctgggcagccggaagggcgtgaacttgccaggggcccaggtggacttgcccgggctgtccgagcaggacgtccgagacctgcgcttcggggtggagcatggggtggacatcgtctttgcctcctttgtgcggaaagccagcgacgtggctgccgtcagggctgctctgggtccggaaggacacggcatcaagatcatcagcaaaattgagaaccacgaaggcgtgaagaggtttgatgaaatcctggaggtgagcgacggcatcatggtggcacggggggacctaggcatcgagatcccagcagagaaggttttcctggctcagaagatgatgattgggcgctgcaacttggcgggcaagcctgttgtctgtgccacacagatgctggagagcatgattaccaagccccggccaacgagggcagagacaagcgatgtcgccaatgctgtgctggatggggctgactgcatcatgctgtcaggggagactgccaagggcaacttccctgtggaagcggtgaagatgcagcatgcgattgcccgggaggcagaggccgcagtgtaccaccggcagctgtttgaggagctacgtcgggcagcgccactaagccgtgatcccactgaggtcaccgccattggtgctgtggaggctgccttcaagtgctgtgctgctgccatcattgtgctgaccacaactggccgctcagcccagcttctgtctcggtaccgacctcgggcagcagtcattgctgtcacccgctctgcccaggctgcccgccaggtccacttatgccgaggagtcttccccttgctttaccgtgaacctccagaagccatctgggcagatgatgtagatcgccgggtgcaatttggcattgaaagtggaaagctccgtggcttcctccgtgttggagacctggtgattgtggtgacaggctggcgacctggctccggctacaccaacatcatgcgggtgctaagcatatcctgagacgcccctccctcctctggcccagcctacccttgtaccccatcccttcctccccagtctacgttctccagcccacacccctccaaagccccacctttaagtcctctcttctctattcctgaccctccctacctgaggcctatctgagactataactgtcatctagccccttcgaggttgccccttccccatctccatttcacacaggtcctgaaagtctgtgtccaattatgcactggccacccaacagcaccaattgtacattccctgcatccaatctgctcagcaggccctaagatgccttgagtctttaatcccagtttggctggttaattccataaccccaggcatcccatcccttggggtgggggagaggggagacagggcaatcttgtccacagtctcccattctcatatgtagccctcatgataatctgggcatctcgtgccagggcaggctaccccttcatggtgactaacagttacatgaaagtccacgcttttgggaaaactgggtgggatggatgctggggagaagtgagggctgggcagctgattttgtcactgtcttcacaacctccgtgctgggcttgtagaccactgtcctggctgctctcatgcctgcctgataccctgcttggtcaaatccccggctgcttccttctgcacccagaaattccttcccactcatgttgttcccacacacaaaccaagagccaaaaatgagtgtgtc

SEQ ID NO: 139 - DNA, 1537 bp, Homo sapiens
cggacccggaagtgcttggccacagtcgcagccccggcgccccgaagcgggaaaaaggctgggtgccgccgtcccccagctgcgcaaccctaggaactctcgggttcacagtctctctttttctaggaacttggctgtgttgtcctgcctcagagacaaattcatctattgtaggcctagcccctgcctttgaaaacaaggaaaggttggtagaacatcaacacagcatggaatttccagggaggtctcatttcaaaacttcataaagaacaagaaccacctggacttctgtgagggcgatgattaaactggcctgagtttgaatgaaaggataatgtatgctcaacctgtgactaacaccaaggaggtcaagtggcagaaggtcttgtatgagcgacagccctttcctgataactatgtggaccggcgattcctggaagagctccggaaaaacatccatgctcggaaataccaatattgggctgtggtatttgagtccagtgtggtgatccagcagctgtgcagtgtttgtgtttttgtggttatctggtggtatatggatgagggtcttctggccccccattggcttttagggactggtctggcttcttcactgattgggtatgttttgtttgatctcattgatggaggtgaagggcggaagaagagtgggcagacccggtgggctgacctgaagagtgccctagtcttcattactttcacttatgggttttcaccagtgctgaagacccttacagagtctgtcagcactgacaccatctatgccatgtcagtcttcatgctgttaggccatctcatcttttttgactatggtgccaatgctgccattgtatccagcacactatccttgaacatggccatctttgcttctgtatgcttggcatcacgtcttccccggtccctgcatgccttcatcatggtgacatttgccattcagatttttgccctgtggcccatgttgcagaagaaactaaaggcatgtactccccggagctatgtgggggtcacactgctttttgcattttcagccgtgggaggcctactgtccattagtgctgtgggagccgtactctttgcccttctgctgatgtctatctcatgtctgtgtccattctacctcattcgcttgcagctttttaaagaaaacattcatgggccttgggatgaagctgaaatcaaggaagacttgtccaggttcctcagttaaattaggacatccattacattattaaagcaagctgatagattagcctcctaactagtatagaacttaaagacagagttccattctggaagcagcatgtcattgtggtaagagaatagagatcaaaaccaaaaaaaatgaaccaaaggcttgggtggtgagggtgcttatcctttctgttattttgtagatgaaaaaactttctggggacctcttgaattacatgctgtaacatatgaagtgatgtggtttctattaaaaaaataacacatccaaaaaaaaaaaaaaaaaaaaaaaaaaaaaaaaaaaaaa

SEQ ID NO: 140 - DNA, 2904 bp, Homo sapiens
ggaaactggcggtggccgcggccgccgagtcggtctgcgcatcctcctgcgttttctcgcttggatcttggcactgagaggcggtggccggcgggatggagaaaagtaggatgaacctgcccaaggggccggacacgctctgcttcgacaaggacgagttcatgaaggaagatttcgatgtcgatcattttgtgtctgactgtaggaagcgggtccagctggaagaactgagagatgacctggagctctactataaacttcttaaaacagccatggtcgaactcatcaacaaggattatgcagattttgtcaatctttcaacaaacttggttggcatggacaaagccctcaaccagctttctgtgcctttgggacaattacgagaagaggttctgagccttagatcgtctgtcagtgaaggaattcgggcagttgatgaacgaatgtctaaacaagaggacattaggaaaaaaaagatgtgtgtattgaggcttatacaagttattcggtcagttgagaaaattgaaaaaatcttaaactctcaaagttctaaagaaacctctgcactagaagcaagcagcccccttttgactggacaaattttggagagaattgccacagaatttaatcagttacagtttcatgctgttcaaagcaaaggcatgcctcttttggacaaagtaagaccgcgtatagctggcattacagccatgttacagcagtcactggaaggtctcctattagaaggccttcagacgtctgacgtcgatataatacggcactgcttgcggacttacgccacgattgacaagacacgggacgcggaggccttagttggccaagtactagtgaaaccatacatagacgaggtgattatagagcagtttgttgaatctcatcccaatggccttcaggtcatgtataataaactcctggagtttgttcctcaccattgccgccttcttcgagaagtcacaggaggtgccatctccagtgaaaaaggcaatactgttcctggatatgactttttggtgaattctgtttggccacaaatagtacaaggattagaagaaaagttaccctcgctttttaatcctgggaatcccgatgcatttcatgagaaatataccataagtatggattttgtcagaagattggaacggcagtgtggatcacaggctagtgtaaagagattaagagcccatcctgcctatcacagcttcaataagaagtggaacttgcctgtttattttcaaataagatttagagaaatagcgggatccttagaagcagcacttacagatgtcctggaagatgccccagctgaaagtccgtattgccttttggcttctcatagaacttggagcagccttaggaggtgttggtcagatgagatgttcttgccattactggtgcatcgcctgtggagactcactctgcagattttggcacgatactctgtgtttgtcaatgagctttcactcaggcccatttctaatgaaagtcccaaggagatcaagaaacctttggtaactggtagcaaagaaccttccatcacccaaggaaacactgaagaccaaggaagtggtccttcggaaacaaagcctgtggtttccatttcccgcactcagctcgtgtatgtggttgcagacctggacaagcttcaggagcagcttccagaactcttggaaataatcaagccaaaacttgaaatgattggctttaagaatttttcttctatctcagcagccctggaggactcccagagctctttttcagcctgtgtgccctccttgagtagcaagatcatccaggatttaagtgactcttgcttcggtttcctaaaaagcgccctggaggttcccaggctttaccgaagaaccaataaggaggtcccaaccacagcttcctcctatgtggacagtgctctgaagcccttattccagcttcagagcggacacaaggataagctcaaacaagcaataattcagcagtggctagaaggcactctcagtgaaagcactcataagtactatgaaaccgtgtcagatgtattaaactctgtgaagaagatggaagagagcctgaaaaggctgaaacaagccagaaaaaccactcccgccaaccccgtcggtcccagtggtggcatgagcgacgacgacaaaatcaggctgcagttggccctagatgttgagtacttgggagagcagatacaaaagttgggactacaagcaagtgacataaaaagcttctcagctctcgcagagcttgttgctgctgccaaggaccaggcaacagcagagcagccttaagcatcttggaagatcccgaggttagattcttaagcaagagaagagttggacttccaggctgaaggggagaaagtgactctgttctcttagcaaccgtctgtagcaaagaagtgcttccagcatcactccagcaacacgcccatgcgtcttctctcagcgtatttgggtcttctttgcccaaaagaacacaaaagcctttttccattgtatggaagatagtttttaagacatttgaaactttctactatagtttacagaacaaattattttatttttattgtaaatcttagtgtggaagagctgatttctaaaatatgattaaagtaaatatatacctatgaatatcaagagtcgtctccctgagcctgtagttggaagtgacgactgtaatggaatgatgtcttgtatagaaatgcccttctctgaaataaagagaactcctgggctttctaaagaggctgcgggaagccatcctccactcccactgtgtgtgagagcagtgcttctgatcctgctgtcaccccgacctctggcaggagccggcgccagtaggaaagacctccttcctaaataaaagaagtgtctcccaaaa

SEQ ID NO: 141 - DNA, 3132 bp, Homo sapiens
ctccaggcaacttggggcaagcgtctcagttctcgctctcccttcctcccagcggggtcgccgcagaccccagccctgggagcaccgctctgcagcgcggccggcgggtggagacggttggcccctaaactcgctcgtccagcccaaccgccccggcggcttctcccagccctcgaggctctcctgagcggcctggagaggcgtcgagcgcagcccagcgcccgcctgctcacccgccccggcccgggaagggaattttcggatcctgcgagcccggggcgcccccgcggcctagggcgggcagctcccggggcctggccgagccggtggcgcccgggaggccgcggggacagcacgcagcgcgcgcccttggatgccgtcccgcagcgacgccccggcccgccccgctcctcctcctgcctggctagcctgcctctcatttgggaagttttgtgggttttctttctcctcctccaaccttggcggaggccacgactcaggcgccacagctgggggctagaggccgcggaccatggtgcggggcagccaccgctgaagtcagcaaaaccgagcctggcctgaggcaggctgcgcgggaggccaaagccatggccattgccacgtcgacccagctggcccgggcactgtatgacaacaccgctgagtccccccaggagctgtccttccgccgaggggatgtcctacgggtcctgcagagagagggcgctggtggactggacggctggtgcctctgctccctacacggccagcagggcattgtgcccgccaacagggtgaagctcttgcctgctggcccagcacccaagcccagcctctctcctgcgtccccagcccagcctggctcaccatatccagccccagatcacagcaatgaggaccaggaggtgtatgtggtgccgcccccagctcggccctgtccaacctcaggacctccagctggaccttgcccaccctctcctgacctcatctacaaaatccccagagctagtgggacccagctggctgctcccagagatgccttggaggtctacgatgtgccccccaccgccctccgggtgccctccagtggcccctatgactgccctgcctccttttcccaccctctgacccgggttgccccgcagccccctggagaggatgatgctccctatgatgtgcctctgaccccaaagccacctgcagagctggaaccagatctggagtgggaaggaggccgggagccggggccccccatctatgctgccccctccaacctgaaacgagcgtcagccttactcaatttgtatgaagcacccgaggaactgctggcagacggggagggcgggggcactgatgaggggatctacgatgtgcctctgctggggccagaggctcccccttctccagagccccctggagccttggcctcccatgaccaggacaccctggcccagcttctggccagaagccccccacccccacacaggccccggctcccctcagctgagagcctgtcccgccgccctctgcctgccctgcctgtccctgaggcccccagcccctccccagtgccctctcctgccccaggccggaagggcagcatccaggaccggcctctgcccccacccccaccccgcctgcctggttatggaggccccaaggtcgagggggatccagagggcagggagatggaggatgacccagcaggacaccacaatgagtacgagggcattccgatggccgaggagtatgactatgtccacctgaagggcatggacaaagctcagggatctaggcccccggatcaggcctgcacaggggatcctgaactgcccgagagggggatgccggcgccgcaggaggccctgtccccaggggagccactggttgtgtccaccggagatctgcagctcctgtacttctatgctgggcaatgccagagccactactcagccctgcaggcagccgtggcagccctgatgtccagtacccaggctaatcagcccccgcgccttttcgtgccccacagcaagagggtggtggtggctgctcatcgcctggtgtttgttggggacaccctgggccggctggcagcctctgcccctctgagagcacaggtcagggctgcaggtacagcactgggccaggcattgcgggccactgtgctggctgtcaagggagctgccctgggctacccatccagccctgccatccaagagatggtgcagtgtgtaacagaactggcagggcaggccctgcaattcactaccctgctcactagcctggctccatgaaggtcctttggcacagctctgctcctcccctgcctgccaaagcccccctttaggccttgggtggctggaaggctttgttaagggactaggagaaatgggggtatctttcccctttcctgccctttctgctcatctcaacctctcacagaggtgtcttctccccctaacctacagctttttgtacaagccattttgtgtaaattatttatatttaatattattccctgctttgtcaggagcaggtactaggctctggggcagtgaggaactagatccttctctcctcagcctagggtggaggtcactgcactaccacccacctctggaagactggctgtgaaaagtcaggtggcagaaacctggggccacatagagcctctctcttttcctgtttcttggctctagaagatcagcactgcactgttagctgagagtgcgggcaagacataaactgtccagagtttgaaggttctcggaaagaccggagggcttctccccacagaaggcggagagagctggggctcagacatgggtgtgcaccttaataaaccctgctgtctgcctccctgactctgcttcttgggagcatggtgagcagccctggtgctcagcagccatacctatgggacacacactacgaaaaggatgcctttagggtttgggggagattttactcctttcttcaacaactattcactggacaagttctctgctcccatgacgcgccaggcacagttctgcaagtatattgtgaatgtattgttctagtgggatacacaaataagtcagttaaaatacataaataaaaacataaacctgccataaaaaaaaaaaaaaa

SEQ ID NO: 142 - DNA, 1477 bp, Homo sapiens
atgaaccacaagagcaagaagcgcatccgcgaggccaagcggagtgcgcggccggagctcaaggactcgctggattggacccggcacaactactacgagagcttctcgctgagcccggcggccgtggcggataacgtggaaagggcagatgctttacagctgtctgtggaagaatttgtggagcggtatgaaagaccttacaagcccgtggttttgttgaatgcgcaagagggctggtctgcgcaggagaaatggactctggagcgcctaaaaaggaaatatcggaaccagaagttcaagtgtggtgaggataacgatggctactcagtgaagatgaagatgaaatactacatcgagtacatggagagcactcgagatgatagtcccctttacatctttgacagcagctatggtgaacaccctaaaagaaggaaacttttggaagactacaaggtgccaaagtttttcactgatgaccttttccagtatgctggggagaagcgcaggcccccttacaggtggtttgtgatggggccaccacgctccggaactgggattcacatcgaccctctgggaaccagtgcctggaatgccttagttcagggccacaagcgctggtgcctgtttcctaccagcactcccagggaactcatcaaagtgacccgagacgaaggagggaaccagcaagacgaagctattacctggtttaatgttatttatccccggacacagcttccaacctggccacctgaattcaaacccctggaaatcttacaaaaaccaggagagactgtctttgtaccaggaggctggtggcatgttgtcctcaatctcgacactactatcgccatcacccaaaattttgccagcagcaccaacttccctgtggtatggcacaagacggtaagagggagaccaaagttatcaaggaaatggtataggattttgaagcaagagcaccccgagttggcagtcctcgcagactcggttgaccttcaggagtccacagggatagcttccgacagctccagcgactcttccagctcctccagctccagttcgtcagactccgactcagagaggattagggacacttgtggaggccgggctcacccctgagcagataaagagactctccctgaggtgctttcagcgtaagcttttggcagccacccaactcagttctcgcatcttctgctcctaccttctcctctgtcttctttgaatttggatattccttccctggtccaagctcctatcttcggtcaaatgctgtttttactgcttcctaaggatagattatcaagaaatttaacagctcggccagctcagtgaaacactgaagctaatgggatgttgggtaagaaggttctgtgctgtctcattgaaaaccgagccagtcaaccacaaggctggcagggtgtgatccttgtaacgtcttgtgtctgttacctcacggatgtcggtaaggagtttc

SEQ ID NO: 143 - DNA, 5297 bp, Homo sapiens
gggccgggccgggctgggctggagcagcggcgcccgggagccgagcttgcagcgagggaccggctgaggcgcgcgggagggaaggaggcaagggctccgcggcgctgtcgcgctgccgctcactctcggggaagagatggcggcggagcggggagcccggcgactcctcagcaccccctccttctggctctactgcctgctgctgctcgggcgccgggcgccgggcgccgcggcggccaggagcggctccgcgccgcagtccccaggagccagcattcgaacgttcactccattttattttctggtggagccggtggatacactctcagttagaggctcttctgttatattaaactgttcagcatattctgagccttctccaaaaattgaatggaaaaaagatggaacttttttaaacttagtatcagatgatcgacgccagcttctcccggatggatctttatttatcagcaatgtggtgcattccaaacacaataaacctgatgaaggttattatcagtgtgtggccactgttgagagtcttggaactattatcagtagaacagcgaagctcatagtagcaggtcttccaagatttaccagccaaccagaaccttcctcagtttatgctgggaacggagcaattctgaattgtgaagttaatgcagatttggtcccatttgtgaggtgggaacagaacagacaaccccttcttctggatgatagagttatcaaacttccaagtggaatgctggttatcagcaatgcaactgaaggagatggcgggctttatcgctgcgtagtggaaagtggtgggccaccaaagtatagtgatgaagttgaattgaaggttcttccagatcctgaggtgatatcagacttggtatttttgaaacagccttctcccttagtcagagtcattggtcaggatgtagtgttgccatgtgttgcttcaggacttcctactccaaccattaaatggatgaaaaatgaggaggcacttgacacagaaagctctgaaagattggtattgctggcaggtggtagcctggagatcagtgatgttactgaggatgatgctgggacttatttttgtatagctgataatggaaatgagacaattgaagctcaagcagagcttacagtgcaagctcaacctgaattcctgaagcagcctactaatatatatgctcacgaatctatggatattgtatttgaatgtgaagtgactggaaaaccaactccaactgtgaagtgggtcaaaaatggggatatggttatcccaagtgattattttaagattgtaaaggaacataatcttcaagttttgggtctggtgaaatcagatgaagggttctatcagtgcattgctgaaaatgatgttggaaatgcacaagctggagcccaactgataatccttgaacatgcaccagccacaacgggaccactgccttcagctcctcgggatgtcgtggcctccctggtctctacccgcttcatcaaattgacgtggcggacacctgcatcagatcctcacggagacaaccttacctactctgtgttctacaccaaggaagggattgctagggaacgtgttgagaataccagtcacccaggagagatgcaagtaaccattcaaaacctaatgccagcgaccgtgtacatctttagagttatggctcaaaataagcatggctcaggagagagttcagctccactgcgagtagaaacacaacctgaggttcagctccctggcccagcacctaaccttcgtgcatatgcagcttcgcctacctccatcactgttacgtgggaaacaccagtgtctggcaatggggaaattcagaattataagttgtactacatggaaaaggggactgataaagaacaggatgttgatgtttcaagtcactcttacaccattaatgggttgaaaaaatatacagagtatagtttccgagtggtggcctacaataaacatggtcctggagtttccacaccagatgttgctgttcgaacattgtcagatgttcccagtgctgctcctcagaatctgtccttggaagtgagaaattcaaagagtattatgattcactggcagccacctgctccagccacacaaaatgggcagattactggctacaagattcgctaccgaaaggcctcccgaaagagtgatgtcactgagaccttggtaagcgggacacagctgtctcagctgattgaaggtcttgatcgggggactgagtataatttccgagtggctgctctaacaatcaatggtacaggcccggcaactgactggctgtctgctgaaacttttgaaagtgacctagatgaaactcgtgttcctgaagtgcctagctctcttcacgtacgcccgctcgttactagcatcgtagtgagctggactcctccagagaatcagaacattgtggtcagaggttacgccattggttatggcattggcagccctcatgcccagaccatcaaagtggactataaacagcgctattacaccattgaaaatctggatcccagctctcactatgtgattaccctgaaagcatttaataacgtgggtgaaggcatccccctgtatgagagtgctgtgaccaggcctcacacagacacttctgaagttgatttatttgttattaatgctccatacactccagtgccagatcccactcccatgatgccaccagtgggagttcaggcttccattctgagtcatgacaccatcaggattacgtgggcagacaactcgctgcccaagcaccagaagattacagactcccgatactacaccgtccgatggaaaaccaacatcccagcaaacaccaagtacaagaatgcaaatgcaaccactttgagttatttggtgactggtttaaagccgaatacactctatgaattctctgtgatggtgaccaaaggtcgaagatcaagtacatggagtatgacagcccatgggaccacctttgaattagttccgacttctccacccaaggatgtgactgttgtgagtaaagaggggaaacctaagaccataattgtgaattggcagcctccctctgaagccaatggcaaaattacaggttacatcatatattacagtacagatgtgaatgcagagatacatgactgggttattgagcctgttgtgggaaacagactgactcaccagatacaagagttaactcttgacacaccatactacttcaaaatccaggcacggaactcaaagggcatgggacccatgtctgaagctgtccaattcagaacacctaaagcggactcctctgataaaatgcctaatgatcaagcctcagggtctggagggaaaggaagccggctgccagacctaggatccgactacaaacctccaatgagcggcagtaacagccctcatgggagccccacctctcctctggacagtaatatgctgctggtcataattgtttctgttggcgtcatcaccatcgtggtggttgtgattatcgctgtcttttgtacccgtcgtaccacctctcaccagaaaaagaaacgagctgcctgcaaatcagtgaatggctctcataagtacaaagggaattccaaagatgtgaaacctccagatctctggatccatcatgagagactggagctgaaacccattgataagtctccagacccaaaccccatcatgactgatactccaattcctcgcaactctcaagatatcacaccagttgacaactccatggacagcaatatccatcaaaggcgaaattcatacagagggcatgagtcagaggacagcatgtctacactggctggaaggcgaggaatgagaccaaaaatgatgatgccctttgactcccagccaccccagcctgtgattagtgcccatcccatccattccctcgataaccctcaccatcatttccactccagcagcctcgcttctccagctcgcagtcatctctaccacccgggcagcccatggcccattggcacatccatgtccctttcagacagggccaattccacagaatccgttcgaaatacccccagcactgacaccatgccagcctcttcgtctcaaacatgctgcactgatcaccaggaccctgaaggtgctaccagctcctcttacttggccagctcccaagaggaagattcaggccagagtcttcccactgcccatgttcgcccttcccacccattgaagagcttcgccgtgccagcaatcccgcctccaggacctcccacctatgatcctgcattgccaagcacaccattactgtcccagcaagctctgaaccatcacattcactcagtgaagacagcctccatcgggactctaggaaggagccggcctcctatgccagtggttgttcccagtgcccctgaagtgcaggagaccacaaggatgttggaagactccgagagtagctatgaaccagatgagctgaccaaagagatggcccacctggaaggactaatgaaggacctaaacgctatcacaacagcatgacgaccttcaccaggacctgacttcaaacctgagtctggaagtcttggaacttaacccttgaaaacaaggaattgtacagagtacgagaggacagcacttgagaacacagaatgagccagcagactggccagcgcctctgtgtagggctggctccaggcatggccacctgccttcccctggtcagcctggaagaagcctgtgtcgaggcagcttccctttgcctgctgatattctgcaggactgggcaccatgggccaaaattttgtgtccagggaagaggcgagaagtgcaacctgcatttcactttgtggtcaggccgtgtctttgtgctgtgactgcatcacctttatggagtgtagacattggcatttatgtacaattttatttgtgtcttattttattttaccttcaaaaacaaaaacgccatccaaaaccaaggaagtccttggtgttctccacaagtggttgacatttgactgcttgttccaattatgtatggaaagtctttgacagtgtgggtcgttcctggggttggcttgttttttggtttcatttttattttttaattctgagtcattgcatcctctaccagctgttaatccatcactctgagggggaggaaatgttgcattgctgtttgtaagctttttttattatttttttattataattattaaaggcctgactctttcctctcatcactgtgagattacagatctatttgaattgaatgaaatgtaacattgaaaaaaaaaaaaaaaaaaaaaaaaaaaaa

SEQ ID NO: 144 - DNA, 9525 bp, Homo sapiens
atggtagagaatgtggttgtcacaggggtgtgtgtcagtcggtctggtgttcacaccatcaaatctggacaaacagaggatgtgcagatgctcctgcgctttggggcagatcccactttgctggatcgacagtctcggtctgttgtggatgtcctgaagaggaataagaacttcaaagccatcgagaaaatcaacagtcacttagaaaagctagctacgtgttctaaggacctatcaggattcagcaatggtgatggacccactagtgaaaacgacattttcaggaaggtcttggagcagctggtgaagtatatgaactcaggaaaccggttattgcataaaaactttctgaagcaggaagtagttcagaggttcttgcgtctcctttctactctgcaagaaattcctcctgacctggtctgtgatattaatcaagactgtgccaccaccgtcttcaaattcttattggaaaaacagagatggcctgaggtgcttctgctgctgacccgcaaagtaagtggagaaccaccgcttggggattgcctcatcaaagactgcaacttctcagacctcgacatctgtaccatcatcccccatctcagcacctgggaccagcggaagaaacagcttctgggctgcctgatagacagtggagccttgcctgatggtcttcaggagagccaggagaggccagttgtcacgtgcctgaaacatgaggacttcgagttggctttccttctcttgaccaagggcgcagacccccgtgctatttctctcacggaaggtgatactcctttgcatgcagcactccacatctttctagagattaaagctgacattggttttagcttcctcagccatctgttggatctgttttggtccaaccccactgaattcgactacctcaaccccaatgtccaggacagcaatgggaacacgctgatgcacatcctcttccagaagggcatgctaaagcgcgtgaagaagctgttagacctgctggtgaagtttgacatcaacttcaatctgaagaacaaagagggcaaagatgcacggcaccggattaagaagaacgactctctgctcttggcctggaacaaagctctgatggagaacaggaggaggagccggcaggactctgctgcccacctggggaagctctcaaagtccactgcccctggtcacacatctcagctcaagtcccagggttcattcaagtcagtgccatgtggtgccactgccagaacactgcctgaaggaagtgcagtccctgacagctgggagactctcccaggtacccaggtgaccaggaaggagcctggagctctcaggccctgctcgctgagagactgccttatgcaggacatcacagttttgattcagcaggttgaagtggatccgtctttcccagaggactgtcttcagagctctgagcctctggaggcaggagctggcaaagaaggaaagaaagatgacaagccgactctgggtgcaggggcccctgactgtagtgaggtgggggaaggacatgctcaggtgggccttggggccttgcagcttgtgcctgatgataacagggggaaggagggcaatgatgatcaggatgactggagcacgcaggagattgaggcctgcctccaggacttcgataacatgacctgggagatcgagtgcacttcagaaatgctgaagaagctgtctagtaaggtaatgaccaaggtcatcaagaagaaaatcatccttgccattcagcagctgggaaatggcgagtggacccagggcctgcagaagcgactgaagcacctgaaaggaagcatccagctcttcgaagctaagctggacaaaggagcccggatgctctgggagctcgccattgacttctcccctcgatgcagtgagaaccctgagaagatcattgccacggagcagaacacgtgtgcaatggagaaatcagggcggatctacacggaaatcatccggatttgggacatcgtcttagatcactgcaaactggctgattccatcaaggccatctgcaatgcctacaaccggggcttgtcctgtgtcctgcggaagaagctgaaaggtatcaataaaggccaagtgtcagctaacatgaaaattcaaaagcgtatacctcgctgctatgtggaggacacagaggccgagaagggcagggagcatgtcaatcctgagtactttcccccagccagtgcagtggagacagaatataacatcatgaagttccacagcttcagcaccaacatggcctttaacatcctcaatgacacgacagccacagtggagtaccccttccgggtgggtgagcttgagtacgcggtgatcgacctcaatcccaggccactggagcccatcatccttattgggcgaagtggcactgggaagacaacctgctgcttgtacagattgtggaagaaattccacgtttactgggaaaaagctgagcaggcaggaagcccattgctggccaaacaggtctggctgaagagaaggttggaagtggaacccggaaaagagagtccaggtggggaggaagaggaggaggaagaggacgaggaagaggaagattctattgaagtggaaacagtagaaagcatagatgagcaggagtatgaagcctgcgcaggaggagccggtgtggagccagcaggggacggccaagctgcagaagtatgtgcaccagaacatccccaccagctggagcatttacatcagatctttgtgaccaagaaccatgtgctgtgccaggaggtacaaaggaatttcattgagctttccaagtccaccaaggccactagtcattacaaaccactggaccccaacattcacaaactccaggacctgagggacgagaactttcctctgtttgtcacttccaagcagctgcttcttctgcttgatgcttctctgcccaaaccattttttctgagaaacgaagatggaagcttgaaaagaaccatcataggatggtctgcacaggaagagtcaaccattcctagttggcaagaggatgaagaggaggctgaggtggatggggactacagtgaggaggataaagctgtagaaatgcgtacgggtgacagtgacccccgggtgtacgtgacgtttgaggtgttcaaaaatgaaatatggcccaaaatgaccaaagggaggactgcctacaaccctgcactgatttggaaagaaataaaatcttttctaaagggttcttttgaggccctcagctgtccccatgggagactcactgaagaagtatataagaaattagggaggaaacggtgccccaatttcaaggaagaccggagtgagatctacagcctcttcagtctgtatcagcaaatcaggtcccagaaaggttattttgatgaagaggatgttctgtacaacatatcccggaggctgtcgaagctcagggtgctcccatggtccatccacgagctctatggtgatgagattcaagactttacccaggccgagctggcgctgctgatgaaatgcatcaatgaccccaactctatgttcctcacgggggacacggcccagagcatcatgaagggcgtggccttccgcttcagcgatctgcgctctctgttccattatgccagcagaaacaccatagacaagcagtgtgctgtccggaagcccaagaagatccaccagctgtaccagaattacaggtcccactcaggaatcctcaatctggcatctggagtggtggatttacttcagttctatttcccagaatcttttgatcgccttccaagggattctggcctctttgatggtcctaagccaactgttctggagtcttgtagtgtaagcgacttggcaattttgctacgagggaataaaaggaaaactcagcccattgaatttggagcccaccaggtaatccttgtggccaatgaaacggcaaaggagaaaattccagaagagctggggttagcacttgtgctaacaatttatgaagcaaaaggcttagaatttgatgatgtcctcctttacaacttttttactgattctgaggcttataaggaatggaagatcatttcctcattcacacctacctcaactgactccagagaggaaaaccggccattggttgaagtacccctggacaaaccaggctcttctcagggtcgatctctcatggtgaatccagaaatgtacaagctcctcaacggagagctgaagcagctgtacaccgccatcacacgggctcgggtcaacctctggatctttgatgaaaaccgagagaaacgggctcccgcattcaaatatttcattagaagagattttgtccaagttgtaaagacagatgaaaataaagactttgatgatagcatgttcgttaagacctcaactcctgcggagtggattgcacagggagattactacgccaagcaccagtgctggaaggttgcagccaagtgttaccagaaaggaggtgcatttgagaaggagaagttggccctggcccatgacactgccctgagcatgaaatccaagaaagtcagccccaaggaaaagcagttggaatatttggaattggctaagacctatttggagtgcaaagagccaacactgtcccttaagtgtctgagctatgccaaggagttccagctctctgcccagctgtgcgagaggctgggaaagataagagatgctgcctatttctataagcgaagccagtgctacaaagacgctttcagatgctttgagcagattcaggaatttgatctagcactcaaaatgtactgccaagaggagctttttgaagaagctgctattgcagtggaaaagtatgaagaaatgctaaagactaagacccttcccatttccaagctctcctattctgccagtcagttttacttggaagctgcagcaaagtatctgagtgcaaataagatgaaggaaatgatggctgtcctctcaaagctagacatagaagaccagctggtgttcttgaagtctcggaaacgcttagcagaagctgcagacctgctgaacagggaaggtaggagagaagaggctgccctgctgatgaagcaacatggctgcctcctggaggctgccaggctcactgccgacaaggacttccaggcctcatgtctgctgggggccgcccgcctcaatgtggccagggattccgacatagaacacaccaaggacattctgagagaagcacttgatatctgctatcaaactggccagttgtctggcattgcggaggcccacttcctgcaaggggtaatcctgagagactttcagaagctcagggatgccttcttcaagtttgacacgctcaaccactcagctggagtggtggaagcactctacgaagcagccagccagtgtgaggccgagcctgagaagattctgggcctggctccagggggcttggaaatcctcctcagtctggtcagggctctcaaaagagtgaccaacaatgctgagaaggaaatggtcaaatcttgctttgagttttttgggatttcccaggtggatgccaagtattgccagatagctcagaatgaccctgggcccatattaagaataatttttgacctggatttgaacttgagagagaaaaaaacaaaagatcattttttgataatgactgaccaagtgaaattagccctaaacaaacaccttttgggcaggctgtgtcagatcacacggagcctgcttgggaagacctaccgaggagtctgcatgaggtttattgtaggcttaaaatgtgaggatgaaaactgtgaacattttcacaggcctctgcggcgttgtgaagccaagtgtttagttcagtcgaaaatgaacttggtggcaatcaacgggttgcttttggaagccaaaaaagtattccctaaaatcttagcagaagaacttaaagaaattgattatattttgtctacagatatgtatggcctttgcaagtccattctggatgtccttttccctaagcatttccatcagagagtgttgtcagaaaaccccatggcatgcaaagaaatcctcaaaccaaattacaaatccttccggttctacagatttgctttgaaggagtacatccactttctgtttgaaaatgaaagcgcacgcaaccgccgggaatccacagacctgtggctgagtgccatgcaagctttccttctctcttccaactacccggaggagtttgaaaagctgctccaccaggaggaggacaactacaacagggaactcaaagctctagagtctgaaaaggatgaaaggggcagggggagaggcagcaggataaaaggaatagaagggaaatttggcatgctggcacccaacagggatgatgaaaatatggacaagacccacctgtgcttcatccggcttctggagaattgcattgatcaattctacgtgtacaggaacccagaagactacaagaggctctttttccgtttcatgaatgtcctcatcaagaggtgcaaagaaccactcatccccagcattggaaacacagtagccctcctggagttccagttcatccactgtggggtggtgctggcccgcctctggaagaatgtcattctatgcctccccaagagctacattgcactcttgcactactgggagttcctgtttagcaagaaggacaaggagcttggggatgtgttctccatcattcaggaatacaaacccaaggacgtgacaagagccattcaggatttccggttccatctctcctacctcgccaaggtgctatgtggctatgagaatgtgaacttcaacgtcctgcttgatgccttcagtgaaatagactatgtggtctcgggtgaggctgagcggacactggtgctgtgcttggtgatgctagtgaatgctgaggagatcctgcagccatactgcaagcctctcctgtatcgccacttccgggagattgagtcaaggctgcagctcatgagcatggactgccctggccaggttcccgagaggctcctgaaggtggtgaagcgggtcttggtggcagtcaatgtgaagtctgtggctgaggcactgcaggacctgctctttgagcgggatgaagagtacctaatggactgtgactggcggtgggaccctgtgcacaccaaagggtccatagtccgtggcctctattatgaggaggtcagactaaaccgcctgctctgtttggaccctgtggactactttgctgaacctgagtgtgagtttggccaggatgagatggatgaactggcattagaagaccgagaccacgtcctggccaccattctttcccaaaagcaacggaaggcctccatacagcggaagttgaggagggcatgcctggtggtgtctctgtgcatcagttggaggagaagagtgggcacccagatggagcgtgtcagggaggaggccagggagcccagggctgggaacttcaaaaaggcagacgtggacaggacccagtgtgacctatgtggagtgaagtttacccgtggcccagagaactatttcagccccagcaaagcgtttgagggggcagcttccgaggtggcagtcctttccagggctgagctggaaagggaggagtgtcaggagaggaacagcgagtcttacgagcagcatatccatctagaacaccaccagaggcagcaagtggcctaccagaaatactcagaatttttccacgagaaggtggacccggccattgatgaaggcaagctggtggtgcaggacatcgagcaaagtgtatggatccacagtcacgtgggctccaaggagcacagccacatgctgcagaaggtccaggagcacatcaagagggtttcggatatggtggaggacctctacaggcggaaggcctgggctggcgcggaggaggcgatgactcggctggtcaacattctgatcctgtcagtcagggatgcacgagactggttgatgaaaacagagacccgcttaaagaaggaaggtattgttcaggaagatgattatgaaaatgaagttgaagactttggtgagcttcggcctagaaggcgttctcggaaatgtggaaagcagagaaaatactaatgtccacacagctgcagcctcctcatccttcggaacattccattctgacttagaattctgagcgctggggcagaagacaaaaagaatgtgaattagcattttaaaaataggggagtctaacaacaccattgctttttattctcattacttctctttcagtggcttaggatctgattgctccctcacctctaaagtgtttccaagtagagtctggcagtattagtttcccccacaaacaaattcaggtagagaagttgtagtcgaagggaatgttgggactcctcactgcatggtccctggggtgtctggctcatccccatcatgacatgagttggtagcagaggactaggtgttaggacagactctcctcacctcagttgctgctgctctgggccaggaaatctctctatggattccctcatctcctgccacactgctgcagcatcaagtgtgctatgagagctgtatgtgcccaggggtgggccctgccactggccaccccgagcccaggacgcattctggtcatctctgagcccacttgtagtgtagcttcttctgttagagatgttagccttttctctctgtggcgacttttctgccttcccttcttctgttttttgtgatcattcttagctacctgtgccaagtcacagttagactacctcagaatgtagtcaagaattcacccagtgttctttggatgtcccttccctagggggaaaggctggggaatgttgctgggagcattcccagctgcctctccaaagtggtcctaactctgccttggctatggtgcagacattccaaaaagtgttttgtatacagccctgtacatctagttttcttggttctccctggcaagttcgctaccctagcttaggctgacgttctgatgagtctctgcttgctgagctcatcactgtgggatggtgacctgcagagctgcagattggagcaagtggacagaggagggagccagctaagccaaatccgtcactgccacttggctggcaggccttataagagggcggatctgggcccgtttgcaggaggccattgcctaccctctccccacagtgagccagcagccatcagctgatcccacctgggaaaccttcatgcctctctgatggttactgcccacccttaccccacccctcagctcagcctggtatggaaagcaaggtgcacgttggtctttgattgttctgtcctcacagcagagccagctttccccccatgttgctgctgcttttgctgctcatgctgcttgttgttttctcttccttatctttccaaattgtttccttgaaatgcttgtttccaatttttcttagattatgtttctaatttttattccaggtgtttttttttcttacttgacagaaaaaaagaaaaccccaacaatatcttgctgtattatcacattttttataaagttaaagcatttctctt

SEQ ID NO: 145 - DNA, 1437 bp, Homo sapiens
cagggccgagccagccccttcaccaccagccggccgcgccccgggaagggaagtttgtggcggaggaggttcgtacgggaggagggggaggcgcccacgcatctggggctgactcgctctttcgcaaaacgtctgggaggagtccctggggccacaaaactgcctccttcctgaggccagaaggagagaagacgtgcagggaccccgcgcacaggagctgccctcgcgacatgggtcacccgccgctgctgccgctgctgctgctgctccacacctgcgtcccagcctcttggggcctgcggtgcatgcagtgtaagaccaacggggattgccgtgtggaagagtgcgccctgggacaggacctctgcaggaccacgatcgtgcgcttgtgggaagaaggagaagagctggagctggtggagaaaagctgtacccactcagagaagaccaacaggaccctgagctatcggactggcttgaagatcaccagccttaccgaggttgtgtgtgggttagacttgtgcaaccagggcaactctggccgggctgtcacctattcccgaagccgttacctcgaatgcatttcctgtggctcatcagacatgagctgtgagaggggccggcaccagagcctgcagtgccgcagccctgaagaacagtgcctggatgtggtgacccactggatccaggaaggtgaagaagggcgtccaaaggatgaccgccacctccgtggctgtggctaccttcccggctgcccgggctccaatggtttccacaacaacgacaccttccacttcctgaaatgctgcaacaccaccaaatgcaacgagggcccaatcctggagcttgaaaatctgccgcagaatggccgccagtgttacagctgcaaggggaacagcacccatggatgctcctctgaagagactttcctcattgactgccgaggccccatgaatcaatgtctggtagccaccggcactcacgaacgctcactctggggaagctggttgccatgtaaaagtactactgccctgagaccaccatgctgtgaggaagcccaagctactcatgtataaatgccatgtggagatagagccccagatgtttcagccatctcagcccaggcaccagacaagtgggtgaagaagccaccttggacatgtagccccagcagatgtgatatagagaagaaacaggaaacttggctatattagtttcctagggctgcctgtgataaattattacaaactttataaactaacacattgtgtgcctatatcaaaacatcatggaaggacaggcacagtggctcatgcctgtagtcctagcactttgggagggtgagaaaggaagatctcttgagctcaggagttcaagatcagcctgggcaacacagtgagacctcatctccactaaaaataaaaaaaaattggctgg

SEQ ID NO: 146 - DNA, 2146 bp, Homo sapiens
tactcccggagtcactcatcccttaagcaagcagggtggggttaggtgcgcgtgcgcggttttaatactcctccccgaactgccaactcttcacgcacgcgaagtaggccccaccctggctgggtttacgcgtgcgcactaacgggcctggtcccggaagaccacacgcgtgcgtggtggggactacggtgacagtaccccgggtggggcgagggccagtcatggcggagtcctggtctgggcaggccttgcaggctctgccggccacggtgctgggcgcgctgggcagcgagttcttgcgggagtgggaggcgcaggacatgcgcgtgaccctcttcaagctgctgctgctgtggttggtgttaagtctcctgggcatccagctggcgtgggggttctacgggaatacagtgaccgggttgtatcaccgtccaggtctgggtggtcagaatggatccacgcctgatggctccacgcatttcccttcgtgggaaatggcagcaaacgaacctctcaaaacccacagagaataagggaaggcagcagagggtctccaagggcatcactgggtctgctggcttctacactgggttctgctactccccagacctcagggacaactgccgggggttcagggttggtagcagggagtacccagtgcctacagggctgggcctcttctgcctcttaagcctgctccctcacccaggcactgggcaagtgaagagtttgcctgtactcttatctgggtgccttaaggagagagattgtgttcttcctctctcaggggtgataactcaggaagcctctgggttgggaagaccatcagttcttttgtcttaggtttcttttcctgtccctcttccatccccaagatgtgaccccataaaaatttttcctgagttggccaggcatggtggctcacgcctgtaatcccaacactttgggaggctgaggcaggcagatcacgaggtcaggagttcgagaccagcctgaccaacatggtgaaaaccccatctctactaaaaatacaaaaattagccgggtgtggtggcacacaccagtaatcccagctactcgggaggctgaagcaggagatttgcttgaacctgggaggcagaggttgcagtgagccaagattgcgccgttgtactccagcctgggcaacagagcaagacccatctcaaaaaaaaaatttttttcctgagaggaagcctgaggttgaccagctctggggtttgtaaggcaggtctgttttctcctaggccctgagttttctgaatctctggttttgctttgttggcaaggagccagggaatcctgacctgagccagaccttaagctctatggttatttagctggccattcaggtataaggcagggtggtgtacctgctggcactatccagatggaggcaccaaacacccacatacctggcccaaccagacttctcccgtgagccaggcaaaggaaattgtcatctgccaactgtcctactcatattcctctcagtccttcttgggggtaagctgattacctgaaggacagctgaacccctggggtagcctcctatccaccactgcttaagtgcctatgggaatgtgggtctgcaccttgtcccctcataggatggtaccaagcatttagtgcacagtggccccatcatagcctgcagcctcatcatttcccatctggacctggtacaaatgcacgtcacaggctcagctcctccccactagcatcttctctaccttcaagaaccaggcagccctgccatgtcacaataggccaggggagtttccaaagatgtgggtggcaaatgcccctatagaaacaccagtacctgaaagcactgtagccctggacctgcctccttccctcggggccatacttctgtttccatctgctgggccaccagccactttagtgacccctgcctacttccttcctgttggatatcatacttccatctggctgcctttgcttaagccatctttgtggtagaggggccctggaattgcagctgtactgaggatgatgttattcacagcccctggcccacccactaatactactgcacagagtcaggatctcacatttcaccccaggctcaactgaggatgtggcttattaaacacggaagtgc

SEQ ID NO: 147 - DNA, 2205 bp, Homo sapiens
gaagggcctggggaagccaggtggccagggagatgccatccagctaagccctaagctccaggctctggctgaggaacccagccagcctcatactcggagcccggccaaaaacaagaagacgctggggaggaaacgtgggcacaagggttccttcaaggacgacccccagctctaccaggagatccaggagcggggcctgaacaccagccaggagtctgatgacgacatcctcgatgagtcctccagccccgagggaacccagaaggtggacgccaccattgtggtcaagagctaccggcccgcccaggtcacctggagccagctcccggaggtggtggaattgggcatcctggaccagctctccactgaggagcggaaaaggcaggaggccatgttcgagatcctcacgtcggagttctcctaccagcacagcctgagcatcctggtggaggagttcctgcagtccaaggagctgcgggcgaccgtgacccagatggagcaccaccacctcttctccaacatcctggatgtcctgggtgccagtcagaggttcttcgaggacctggagcagcggcacaaggcccaggtgctggtcgaggacatcagtgacatcctggaggagcacgctgagaagtacttccacccctacatcgcctactgctccaacgaggtctaccaacagcgcacgctgcagaagctgataagcagcaacgccgccttccgagaggccctgagagagattgagaggcggccggcgtgcgggggcctgcccatgctctccttcctgatcctccccatgcagcgggtgacccggctgcccctcctgatggatacgctctgcctcaagacccagggccactccgaaaggtacaaggctgccagccgtgcactgaaggccatcagcaagctggtgaggcagtgcaacgagggggcccacaggatggagcgcatggagcagatgtacacgctgcacacacagctggacttcagcaaggtcaagtccctcccactgatctccgcctcccggtggctgctgaagcgcggagagctgttcttagtggaagaaaccggactttttcgaaaaattgccagccggccaacgtgctaccttttcctgttcaacgatgtcctggttgtgaccaagaagaagagcgaggagagctacatggtccaggactacgcccagatgaaccacatccaggtagagaagatagagccgtctgagctccctctgcccgggggcggcaaccgtagctcctccgtgccccaccccttccaggtgaccctgcttcgcaacagcgagggccgccaggagcagctcctgctctcctcggactccgcgagtgaccgggcacggtggatcgtggcgctcacacacagtgagagacagtggcagggcctctccagcaaaggagacctgccccaggtggagatcaccaaggccttcttcgcgaagcaagcagacgaggtcacactgcagcaggcggacgtggtcctggttctgcagcaggaggatgggtggctctatggcgagaggctccgggacggagagacgggatggttccccgaggactttgcccgcttcatcaccagccgtgtggccgtggagggcaatgtccgcaggatggagcgtctgcgggtggagacggacgtgtagccctggcgaggccagccggcggcagcacagcctgtccccaatcagcaagtggtcgtgcctggctctagagagcgtggggagctggtctcaaggacccagcatggttccctggggcttcccaagagcctgtggctgtggtgccgggctccagacacttcacggaaggaagatcacatgtccccagagaggcacccccaggcaagctcgagggggccacaccgtgtcccagggagcccagcctattcccgttggctggctgggcccctctcagctgctgggccccacctccccactgcacccaggggacaactccacctggactgatgggcacaggaggcaccaatagcgattattgggggcaatgcgaggtctcctcctatgcccttcctacccctgagtgggacaagaagggccttgagtgcccaggagtgccccacgttctgagaaggggccggccggagggaggggacccggcagggagatttcggttttgaggtttctaaatacattaaagttatttcttaagaaaaaaaaaaaaaaaaaaaaaa

SEQ ID NO: 148 - DNA, 2283 bp, Homo sapiens
tttccgcgttctcccctctccgcgggcagtgctagctcgccgcggccgcctccggggaccacctggcttcatgtgtggatttccacggctcttgcccagaggcgggtacactgtgttccaatgtgccacggaactcacgcagtggcactttgtggcttcatgaaggaagaggcaggccacgcaacacttcctccccaagccaaggagaagtatcacttttagaggcagaggagcggaaggcagtgggtgtgaccaaaagtgccatttgttaaagactgttggagcagaactactgagaaaaaccaggcattgtatcttcagttgtcatcaagttcgcaatcagattggaaaagctcaacttgaagctttcttgcctgcagtgaagcagagagatagatattattcacgtaataaaaaacatgggcttcaacctgactttccacctttcctacaaattccgattactgttgctgttgactttgtgcctgacagtggttgggtgggccaccagtaactacttcgtgggtgccattcaagagattcctaaagcaaaggagttcatggctaatttccataagaccctcattttggggaagggaaaaactctgactaatgaagcatccacgaagaaggtagaacttgacaactgcccttctgtgtctccttacctcagaggccagagcaagctcattttcaaaccagatctcactttggaagaggtacaggcagaaaatcccaaagtgtccagaggccggtatcgccctcaggaatgtaaagctttacagagggtcgccatcctcgttccccaccggaacagagagaaacacctgatgtacctgctggaacatctgcatcccttcctgcagaggcagcagctggattatggcatctacgtcatccaccaggctgaaggtaaaaagtttaatcgagccaaactcttgaatgtgggctatctagaagccctcaaggaagaaaattgggactgctttatattccacgatgtggacctggtacccgagaatgactttaacctttacaagtgtgaggagcatcccaagcatctggtggttggcaggaacagcactgggtacaggttacgttacagtggatattttgggggtgttactgccctaagcagagagcagtttttcaaggtgaatggattctctaacaactactggggatggggaggcgaagacgatgacctcagactcagggttgagctccaaagaatgaaaatttcccggcccctgcctgaagtgggtaaatatacaatggtcttccacactagagacaaaggcaatgaggtgaacgcagaacggatgaagctcttacaccaagtgtcacgagtctggagaacagatgggttgagtagttgttcttataaattagtatctgtggaacacaatcctttatatatcaacatcacagtggatttctggtttggtgcatgaccctgggtcttttggtgatgtttggaagaactgattctttgtttgcaataattttggcctagagacttcaaatagtagcacacattaagaacctgttacagctcattgttgagctgaatttttcctttttgtattttcttagcagagctcctggtgatgtagagtataaaacagttgtaacaagacagctttcttagtcattttgatcatgagggttaaatattgtaatatggatacttgaaggactttatataaaaggatgactcaaaggataaaatgaacgctatttgaggactctggttgaaggagatttatttaaatttgaagtaatatattatgggataaaaggccacaggaaataagactgctgaatgtctgagagaaccagagttgttctcgtccaaggtagaaaggtacgaagatacaatactgttattcatttatcctgtacaatcatctgtgaagtggtggtgtcaggtgagaaggcgtccacaaaagaggggagaaaaggcgacgaatcaggacacagtgaacttgggaatgaagaggtagcaggagggtggagtgtcggctgcaaaggcagcagtagctgagctggttgcagctgctgatagccttcaggggaggacctgcccaggtatgccttccagtgatgcccaccagagaatacattctctattagtttttaaagagtttttgtaaaatgattttgtacaagtaggatatgaattagcagtttacaagtttacatattaactaataataaatatgtctatcaaatacctctgtagtaaaatgtgaaaaagcaaaaaaaaaaaaaaaaaaaaaa

SEQ ID NO: 149 - DNA, 3593 bp, Homo sapiens
ctcggccccgggctgccgcgccagcccgtctccgcggcgggggaccgggctgccttggcccctcagcgctcgcgtcttttccggcagttggaacgcttcctgttgtcctcacccgtaaccgcctgttgccccctgtctcagagtccctcacgcgtcccctcccgtctttggctcgttggctgccgccgccggggcttcgccagccttcaagtcgagactactggccgaaggggcgtctgcggctctccgccgtccccagccctgcctctccctgggctctgcagccatggcaatgacaggctcaacaccttgctcatccatgagtaaccacacaaaggaaagggtgacaatgaccaaagtgacactggagaatttttatagcaaccttatcgctcaacatgaagaacgagaaatgagacaaaagaagttagaaaaggtgatggaagaagaaggcctaaaagatgaggagaaacgactccggagatcagcacatgctcggaaggaaacagagtttcttcgtttgaagagaacaagacttggattggaagattttgagtccttaaaagtaataggcagaggagcatttggtgaggtacggcttgttcagaagaaagatacgggacatgtgtatgcaatgaaaatactccgtaaagcagatatgcttgaaaaagagcaggttggccacattcgtgcggagcgtgacattctagtggaggcagacagtttgtgggttgtgaaaatgttctatagttttcaggataagctaaacctctacctaatcatggagttcctgcctggaggggacatgatgaccttgttgatgaaaaaagacactctgacagaagaggagactcagttttatatagcagaaacagtattagccatagactctattcaccaacttggattcatccacagagacatcaaaccagacaaccttcttttggacagcaagggccatgtgaaactttctgactttggtctttgcacaggactgaaaaaagcacataggacagaattttataggaatctgaaccacagcctccccagtgatttcactttccagaacatgaattccaaaaggaaagcagaaacctggaaaagaaatagacgtcagctagccttctccacagtaggcactcctgactacattgctcctgaggtgttcatgcagaccgggtacaacaagctctgtgattggtggtcgcttggggtgatcatgtatgagatgctcatcggctacccacctttctgttctgagacccctcaagagacatataagaaggtgatgaactggaaagaaactttgacttttcctccagaagttcccatctctgagaaagccaaggatctaattttgaggttctgctgtgaatgggaacatagaattggagctcctggagttgaggaaataaaaagtaactctttttttgaaggcgttgactgggaacatatcagagagagacctgctgcaatatctattgaaatcaaaagcattgatgatacctcaaacttcgatgagtttccagaatctgatattcttaagccaacagtggccacaagtaatcatcctgagactgactacaagaacaaagactgggtcttcatcaattacacgtacaagcgctttgagggcctgactgcaaggggggcaataccttcctacatgaaagcagcaaaatagtactcttgccacggaatcctatgtggagcagagttctttgtataacatcatgcttttcctctcacactcttgaagagcttccaagaagttgatggaacccaccaatatgtcatagtaaagtctcctgaaatgtggtagtaagaggattttcttccataatgcatctgaaaaactgtaaacaaagacaaccatttctactacgtcggccataaacagctatcctgctttggaagagaagcatcatgagccaatttgataggtgttttaaaaataacttgagttttcctaagttcatcagaatgaaggggaaaaacagccatcatccaacattattgagattgtcgtgtatagtcatcgaatatcagccagttcctgtaattttgtgacacgctctctgccaagcccaccaagtatttcctttatagctaaaagttccatagtactaaggaaataaagcaataaagacagtctcagcagccaggattctggctgaaggaaatgatccgccaccctgagggtggtgatggtagtttctacccatacctcagcctcaggcgagtggcttatagcctccattcatggtgcactttatttatggtactaagataaagactgtcaatccattgatttatctcctcctgtcccccatctaaaatacccatgctgcttttctgagtgttgatgggggttaccagcttgatccactgttgctcttagaaggcccagaaagtctttgggcattgccaagaaatcccggattatgtggaaaaccctcactttctcttcacggctgtaccagaaaatccctaagacagatcttgccgtggactagcaatacctgcaagtgctgccaatgggaactcaatttattcctgggaacctaacgaggagagcccaggcctaggcaggaggcctggaaccctcttggctaaggtgctgttcctgttcctgcaaggtctccagaacccctttggaaatggtgaaggaaccagcccaatagaagtacagagccagctgacaagtccttgtaaagctcactcctcagtccttggcacagccatgttttgtcttctctcttggtatttcttctctcccaactttagccattttgccttggaatcatgattacaattttttcctttgcagatgccttcctgggggatactcctccccaccctaaagggtcgcctgcaacttaggcggattgggtctctctgctgtggcgttctctcttgagagaccctctgaattttagcacaaagtgccttctgtttcacagctgccaccacctttagaggaatttcgtcagaaaaatgtggaggctccatattaatgcattattttttaaaaagttttgataactcttaaagcatcatttgcacctatgtgggaactttgcctgttgcaaagtattgtggccgagctgcagctgggagcctgctttctgccagtcttgaggttctgaagatcagctttgaaaggaaagtatgtcctagcttagccattcagaagagaaaaatggaatatcagagttacagttgtcagtgaaactactttggattttaacctcttagaggaagaaaaaaggttagggaagtgtcaactctggatgaaggtgatgtgtttgcctctcagtctttcattcatagcctgctagtgaaaaggaagtaaatgagattcttttgtgtgactttgtagtctctttgtattaccaaatagttggggtgttgactcctgtgtgttttgcaagaatgtgtggtaagcctgggtaaagagaaggaactgcggtgttgggagagtctttgtgttggggagtggcaggggatgatttgtttcaggggaaaatgcccacattttaacttttaaacttctgaataaactgtgtaaaaacaaaaaaaaaaaaaaaaaa

SEQ ID NO: 150 - DNA, 4465 bp, Homo sapiens
gcggaccggccgggtggaggccacacgctaccccgaggctgcgtaggccgcgcgaagggggacgccgtgccgtgggcctggggtcgggggagcagcagaccgggaagcaccgtgaggaccgaggatttggggtggaaggcaggcatggtcaaacccatttcactgacaggagagcagagacaggacgtgtctctctccacgtcttccagccagtaaaagaagccaagctggagcccaaagccaggtgttctgactcccagcgtgggggtccctgcaccaaccatgagccgcctgctctggaggaaggtggccggcgccaccgtcgggccagggccggttccagctccggggcgctgggtctccagctccgtccccgcgtccgaccccagcgacgggcagcggcggcggcagcagcagcagcagcagcagcagcagcagcaacagcagcctcagcagccgcaagtgctatcctcggagggcgggcagctgcggcacaacccattggacatccagatgctctcgagagggctgcacgagcaaatcttcgggcaaggaggggagatgcctggcgaggccgcggtgcgccgcagcgtcgagcacctgcagaagcacgggctctgggggcagccagccgtgcccttgcccgacgtggagctgcgcctgccgcccctctacggggacaacctggaccagcacttccgcctcctggcccagaagcagagcctgccctacctggaggcggccaacttgctgttgcaggcccagctgcccccgaagcccccggcttgggcctgggcggagggctggacccggtacggccccgagggggaggccgtacccgtggccatccccgaggagcgggccctggtgttcgacgtggaggtctgcttggcagagggaacttgccccacattggcggtggccatatccccctcggcctggtattcctggtgcagccagcggctggtggaagagcgttactcttggaccagccagctgtcgccggctgacctcatccccctggaggtccctactggtgccagcagccccacccagagagactggcaggagcagttagtggtggggcacaatgtttcctttgaccgagctcatatcagggagcagtacctgatccagggttcccgcatgcgtttcctggacaccatgagcatgcacatggccatctcagggctaagcagcttccagcgcagtctgtggatagcagccaagcagggcaaacacaaggtccagccccccacaaagcaaggccagaagtcccagaggaaagccagaagaggcccagcgatctcatcctgggactggctggacatcagcagtgtcaacagtctggcagaggtgcacagactttatgtaggggggcctcccttagagaaggagcctcgagaactgtttgtgaagggcaccatgaaggacattcgtgagaacttccaggacctgatgcagtactgtgcccaggacgtgtgggccacccatgaggttttccagcagcagctaccgctcttcttggagaggtgtccccacccagtgactctggccggcatgctggagatgggtgtctcctacctgcctgtcaaccagaactgggagcgttacctggcagaggcacagggcacttatgaggagctccagcgggagatgaagaagtcgttgatggatctggccaatgatgcctgccagctgctctcaggagagaggtacaaagaagacccctggctctgggacctggagtgggacctgcaagaatttaagcagaagaaagctaagaaggtgaagaaggaaccagccacagccagcaagttgcccatcgagggggctggggcccctggtgatcccatggatcaggaagacctcggcccctgcagtgaggaggaggagtttcaacaagatgtcatggcccgcgcctgcttgcagaagctgaaggggaccacagagctcctgcccaagcggccccagcaccttcctggacaccctggatggtaccggaagctctgcccccggctagacgaccctgcatggaccccgggccccagcctcctcagcctgcagatgcgggtcacacctaaactcatggcacttacctgggatggcttccctctgcactactcagagcgtcatggctggggctacttggtgcctgggcggcgggacaacctggccaagctgccgacaggtaccaccctggagtcagctggggtggtctgcccctacagagccatcgagtccctgtacaggaagcactgtctcgaacaggggaagcagcagctgatgccccaggaggccggcctggcggaggagttcctgctcactgacaatagtgccatatggcaaacggtagaagaactggattacttagaagtggaggctgaggccaagatggagaacttgcgagctgcagtgccaggtcaacccctagctctgactgcccgtggtggccccaaggacacccagcccagctatcaccatggcaatggaccttacaacgacgtggacatccctggctgctggtttttcaagctgcctcacaaggatggtaatagctgtaatgtgggaagcccctttgccaaggacttcctgcccaagatggaggatggcaccctgcaggctggcccaggaggtgccagtgggccccgtgctctggaaatcaacaaaatgatttctttctggaggaacgcccataaacgtatcagctcccagatggtggtgtggctgcccaggtcagctctgccccgtgctgtgatcaggcaccccgactatgatgaggaaggcctctatggggccatcctgccccaagtggtgactgccggcaccatcactcgccgggctgtggagcccacatggctcaccgccagcaatgcccggcctgaccgagtaggcagtgagttgaaagccatggtgcaggccccacctggctacacccttgtgggtgctgatgtggactcccaagagctgtggattgcagctgtgcttggagacgcccactttgccggcatgcatggctgcacagcctttgggtggatgacactgcagggcaggaagagcaggggcactgatctacacagtaagacagccactactgtgggcatcagccgtgagcatgccaaaatcttcaactacggccgcatctatggtgctgggcagccctttgctgagcgcttactaatgcagtttaaccaccggctcacacagcaggaggcagctgagaaggcccagcagatgtacgctgccaccaagggcctccgctggtatcggctgtcggatgagggcgagtggctggtgagggagttgaacctcccagtggacaggactgagggtggctggatttccctgcaggatctgcgcaaggtccagagagaaactgcaaggaagtcacagtggaagaagtgggaggtggttgctgaacgggcatggaaggggggcacagagtcagaaatgttcaataagcttgagagcattgctacgtctgacataccacgtaccccggtgctgggctgctgcatcagccgagccctggagccctcggctgtccaggaagagtttatgaccagccgtgtgaattgggtggtacagagctctgctgttgactacttacacctcatgcttgtggccatgaagtggctgtttgaagagtttgccatagatgggcgcttctgcatcagcatccatgacgaggttcgctacctggtgcgggaggaggaccgctaccgcgctgccctggccttgcagatcaccaacctcttgaccaggtgcatgtttgcctacaagctgggtctgaatgacttgccccagtcagtcgcctttttcagtgcagtcgatattgaccggtgcctcaggaaggaagtgaccatggattgtaaaaccccttccaacccaactgggatggaaaggagatacgggattccccagggtgaagcgctggatatttaccagataattgaactcaccaaaggctccttggaaaaacgaagccagcctggaccatagcactgcctggaggctctgtatttgctcccgtggagcttcatcggggtggtgcaggctcccaaactcaggctttcagctgtgctttttgcaaaagggcttgcctaaggccagccatttttcagtagcaggacctgccaagaagattccttctaactgaaggtgcagttgaattcagtgggttcagaaccaagatgccaacatcggtgtggactacaggacaaggggcattgttgcttgttgggtaaaaatgaagcagaagccccaaagttcacattaactcaggcatttcatttattttttccttttcttcttggctggttctttgttctgtcccccatgctctgatgcagtgccctagaaggggaaagaattaatgctctaacgtgataaacctgctccaaggcagtggaaataaaaagaaggaaaaaaaagaaaaaaaaaaaaaaaaaaaaaaaaaaaaaat

SEQ ID NO: 151 - DNA, 1666 bp, Homo sapiens
gatccctccgctctggggaggcagcgctggcggcggggctggggccactgaggaaatccatccgcgccgccgccgccgccgccgccgccgccgccgcctccgccgcggaggaagacagcgccgcccgcgcaccgccagcgacccccgccgcagagtcccaccgccacaggcctcgggccagcggccaggagctgcctcccccagcccccgtcccgcggcccccagccgcccccaaccctgccccacgggcccggcgccatgagtgagctggagcaactgagacaggaggccgagcagctccggaaccagatccgggatgcccgaaaagcatgtggggactcaacactgacccagatcacagctgggctggacccagtggggagaatccagatgaggacccggaggaccctccgtgggcacctggcaaagatctatgccatgcactgggggaccgactcaaggctgctggtcagcgcctcccaggatgggaagctcatcatctgggacagctacaccaccaacaaggtccacgccatcccgctgcgctcctcctgggtaatgacctgtgcctacgcgccctcagggaactttgtggcctgtggggggttggacaacatctgctccatctacagcctcaagacccgcgagggcaacgtcagggtcagccgggagctgcctggccacactgggtacctgtcgtgttgccgcttcctggatgacaaccaaatcatcaccagctctggggataccacctgtgccctgtgggacattgagacaggccagcagacagtgggttttgctggacacagtggggatgtgatgtccctgtccctggcccccgatggccgcacgtttgtgtcaggcgcctgtgatgcctctatcaagctgtgggacgtgcgggattccatgtgccgacagaccttcatcggccatgaatccgacatcaatgcagtggctttcttccccaacggctacgccttcaccaccggctctgacgacgccacgtgccgcctcttcgacctgcgggccgatcaggagctcctcatgtactcccatgacaacatcatctgtggcatcacctctgttgccttctcgcgcagcggacggctgctgctcgctggctacgacgacttcaactgcaacatctgggatgccatgaagggcgaccgtgcaggagtcctcgctggccacgacaaccgcgtgagctgcctcggggtcaccgacgatggcatggctgtggccacgggctcctgggactccttcctcaagatctggaactaatggccccacccccactgggcccaggccaggaggggccctgcccatgcccacactacaggccagggctgcggggctggcgcaatcccagcccccttccccgggccacggggccttgggtccctgccctcccacccaggtttggttcctcccggggcccccactgtggagataagaaggggatggaatgggggaagaggaggagcaggaggccctcatccttctgctgccctggggttggggcctcacccctctggagggccggaggcaggaggtggaaaccccaggggctggcttttttaaaactggttttattttaatttttattatattttcagtttttccataaaggagccaattccaactctgtaaaaaaaaaaaaaaaaaa

SEQ ID NO: 152 - DNA, 2165 bp, Homo sapiens
gtcccgttaccgcctcctgctcctgccgcgcgcacccccggggcttcggctccggcacgggtcgcgcccagctttcctgcacctgaggccgccggccagccgccgccatgggtgcctacctctcccagcccaacacggtgaagtgctccggggacggggtcggcgccccgcgcctgccgctgccctacggcttctccgccatgcaaggctggcgcgtctccatggaggatgctcacaactgtattcctgagctggacagtgagacagccatgttttctgtctacgatggacatggaggggaggaagttgccttgtactgtgccaaatatcttcctgatatcatcaaagatcagaaggcctacaaggaaggcaagctacagaaggctttagaagatgccttcttggctattgacgccaaattgaccactgaagaagtcattaaagagctggcacagattgcagggcgacccactgaggatgaagatgaaaaagaaaaagtagctgatgaagatgatgtggacaatgaggaggctgcactgctgcatgaagaggctaccatgactattgaagagctgctgacacgctacgggcagaactgtcacaagggccctccccacagcaaatctggaggtgggacaggcgaggaaccagggtcccagggcctcaatggggaggcaggacctgaggactcaactagggaaactccttcacaagaaaatggccccacagccaaggcctacacaggcttttcctccaactcggaacgtgggactgaggcaggccaagttggtgagcctggcattcccactggtgaggctgggccttcctgctcttcagcctctgacaagctgcctcgagttgctaagtccaagttctttgaggacagtgaggatgagtcagatgaggcggaggaagaagaggaagacagtgaggaatgcagcgaggaagaggatggctacagcagtgaggaggcagagaatgaggaagatgaggatgacaccgaggaggctgaagaggacgatgaagaagaagaagaagagatgatggtgccagggatggaaggcaaagaggagcctggctctgacagtggtacaacagcggtggtggccctgatacgagggaagcagttgattgtagccaacgcaggagactctcgctgtgtggtatctgaggctggcaaagctttagacatgtcctatgatcacaaaccagaggatgaagtagaactagcacgcatcaagaatgctggtggcaaggtcaccatggatgggcgagtcaacgggggcctcaacctctccagagccattggggaccacttctataagagaaacaagaacctgccacctgaggaacagatgatttcagcccttcctgacatcaaggtgctgactctcactgacgaccatgaattcatggtcattgcctgtgatggcatctggaatgtgatgagcagccaggaagttgtagatttcattcaatcaaagatcagccagcgtgatgaaaatggggagcttcggttattgtcatccattgtggaagagctgctggatcagtgcctggcaccagacacttctggggatggtacagggtgtgacaacatgacctgcatcatcatttgcttcaagccccgaaacacagcagagctccagccagagagtggcaagcgaaaactagaggaggtgctctctactgagggggctgaagaaaatggcaacagcgacaagaagaagaaggccaagcgagactagcagtcatccagacccctgcccacctagactgttttctgagccctccggacctgagactgagttttgtctttttcctttagccttagcagtgggtatgaggtgtgcagggggagctgggtggcttcactccgcccattccaaagagggctctccctccacactgcagccgggagcctctgctgtccttcccagccgcctctgctcctcgggctcatcaccggttctgtgcctgtgctctgttgtgttggagggaaggactggcggttctggtttttactctgtgaactttatttaaggacattcttttttattggcggctccatggccctcggccgcttgcacccgctctctgttgtacactttcaatcaacactttttcagactaaaggccaaaacctaatcgtaaaaaaaaaaaaa

SEQ ID NO: 153 - DNA, 2358 bp, Homo sapiens
ggagaggatcccggagccggtgagaattctctgttttttctctaccatcctttccaggccttttcctcacctaatgagtcgtagagacgagggcccagagagtctgtaaagtggctggtgaaagattagtgtcccagggccctacatccgggaggtggttcgggataaagagaactagtcttgggaacaatgtaggtgggaacttaagggaatgggagagcggcccatagaggtggacggagggcgcgattggagtaaagcggaccctgtgtaggtatagagttgagtcaagtggagtcactgcctctgtccctctggtcagcgtgatggccagaggcctggggggcccccactgggtggccgtgggactgctgacctgggcgaccttggggcttctggtggctggactcgggggtcatgacgacctgcacgacgatctgcaagaggacttccatggccacagccacaggcactcacatgaagatttccaccatggtcacagccatgcccatggtcatggccacactcacgagagcatctggcatggacatacccacgatcacgaccatggacattcacatgaggatttacaccatggccatagccatggctactcccatgagagcctctaccacagaggacatggacatgaccatgagcatagccatggaggctatggggagtctggggctccaggcatcaagcaggacctggatgctgtcactctctgggcttatgcactgggggccacagtgctgatctcagcagctccattttttgtcctcttccttatccccgtggagtcgaactctccccggcatcgctctctacttcagatcttgctcagttttgcttccggtgggctcctgggagatgctttcctgcacctcattcctcatgctcttgaacctcattctcaccacactctggagcaacccggacatggacactcccacagtggccagggccccattctgtctgtgggcctgtgggttctcagtggaattgttgcctttcttgtcgtggagaaatttgtgagacatgtgaaaggaggacatggtcacagtcatggacatggacacgctcacagtcatacacgtggaagtcatggacatggaagacaagagcgttctaccaaggagaagcagagctcagaggaagaaggaaaggaaacaagaggggttcagaagaggcgaggagggagcacagtacccaaagatgggccagtgagacctcagaacgctgaagaagaaaaaagaggcttagacctgcgtgtgtcggggtacctgaatctggctgctgacttggcacacaacttcactgatggtctggccattggggcttcctttcgagggggccggggactagggatcctgaccacaatgactgtcctgctacatgaagtgccccacgaggtcggggactttgccatcttggtccagtctggctgcaccaaaaagcaggcgatgcgtctgcaactactgacagcagtaggggcactggcaggcacagctgtgcccttctcactgaaggaggagcagtggacagtgaaattgcaggtggtgcaggtcctggctgggtcctgccatttactgcaggtggctttatctacgtagcaacagtgtctgtgttgcccgagctgctgagggaggcatcaccattgcaatcacttctggaggtgctggggctgctggggggagttatcatgatggtgctgattgcccaccttgagtgaggggtggataaactaccctgccccaaacctctacccctaactccaggtcaggggtgcgtagaggttgggggccctggccagggacatctgccaaaggaaggaactgtagcctgggagcaatggttactttggcattagggccttcaagggctggcagtcttacagaggctggagcggtgagaatgagaggccagagggaccatagtgttgggcactgtctgaccatgttgcatttggaaggctaaatggggccatgaagaaggctggaagggacagggggtgatggcagcctacctggtgtcccctaccccacctgttctcggagaaccaagttgctacacaggaagttctccaaggtccagtttcctttctcccaccagttggtggaggcttcagggaagaccagagtcctggacagagagggtaacaggaggagtcggggataaacatcaaacatcaatcgtgtgtcctgatttgggagtgattggggggatggggtgggagagggttaattggtattctcatggcctgattttttttgtttctattccttttatatcactgtgtttgaatcgagggggaggggtggtaaccggaaataaagacctccgatcttccgcccc

SEQ ID NO: 154 - DNA, 8583 bp, Homo sapiens
ggcttccgctggtggcctagagcggggcccggtatggaggtgggctagaggccgacgccagccagagagcgaaatgttcttttggggccagagtctgggcatatatgaatgcaaatccgtgttttgttcacaactaagcccagctgagacgatcacttttctgtaggccatttgtccaggtacagaatgagcacatgttgttggtgtacgccaggtggtgcttccaccattgacttcctaaagcgctatgcttccaacactccgtccggtgaatttcaaacagccgacgaagacctctgctactgcttggagtgtgtggctgagtaccacaaagcaagagatgaattgccattcttgcatgaggttttatgggaattagaaaccttacgtctcataaatcactttgaaaaatccatgaaggcagaaattggagatgatgatgagttatatatagtagacaataatggagagatgccactgtttgacatcactgggcaagactttgaaaataagcttcgagttcctcttcttgaaatactgaaatatccttacttgcttctacatgaacgtgttaacgagttatgtgttgaagcactttgtcggatggaacaagccaattgctcctttcaggtgtttgataaacatccagggatctatttgtttttagtccatcccaatgaaatggttcggcgttgggctatcttgactgcaagaaacttggggaaagtggacagagatgattattatgacttacaagaagttttactttgcctttttaaagtcattgagttggggcttttagagagtccagacatttatacttcttctgtcctagagaagggtaaactgattcttctgccctcacacatgtatgatactaccaactacaaaagctattggttaggtatttgcatgttgctgaccattcttgaggaacaagccatggattccctgttgttgggctcagacaaacaaaatgattttatgcaatcgatacttcacactatggagagggaagcagatgatgatagtgtggatcctttctggccagcgttacactgttttatggtgattctggatcgccttggatctaaggtctggggtcaacttatggatcctattgtggcatttcaaaccattatcaacaacgcaagctacaatagagagatccgacatatacggaacagctctgtaaggaccaagttagaaccggagtcctatctggatgatatggtgacttgcagccagatcgtatacaattacaatcctgaaaagaccaaaaaggattctggatggagaacagccatttgcccagattattgtcctaacatgtatgaagaaatggaaacattagccagtgtacttcagtcagatattggtcaagacatgcgtgttcataacagcacatttctatggttcatcccttttgtccagtccctcatggatcttaaggatttgggtgtggcttacatagcacaggttgttaatcatctgtactctgaagtcaaagaagtcctcaaccaaacagatgctgtgtgtgacaaagtcactgaattttttcttctaattttggtatcagtgattgaactgcatagaaataaaaaatgtttgcatttgctgtgggtaagttcccagcaatgggtggaagccgtcgtcaaatgtgccaagcttcctaccactgcgtttacacggagttctgagaaatcatctggaaattgctccaaaggaacagcaatgatatcttcactgtcattgcattccatgccatctaactctgtacaacttgcttatgtgcagctgattagaagtctccttaaagaaggttatcagcttgggcagcagtctctttgcaagcgattctgggataagctcaacttattccttagaggaaatttatctctaggttggcagttgactagtcaggaaacccatgagctacaaagttgcttaaagcaaattattagaaacataaaattcaaagcacctccatgtaacacttttgtggatctgacttctgcatgtaaaatctctcctgcatcttataataaagaagaaagtgaacaaatggggaagacgtctagaaaagatatgcattgtttggaagcttccagcccaacattttctaaagaaccaatgaaagtgcaagacagtgtatcgatcaaagcagataacactatagaaggtgacaataatgagcaaaattatataaaggatgtgaaactagaggaccatctcttagctgggtcatgcttaaagcagagtagtaaaaacatttttactgaaagagctgaagatcaaattaaaataagtacaaggaagcagaagtctgtaaaagagatctcttcatatacaccaaaggactgtacttcaagaaatggtccagaaaggggatgtgacagaggaataatagtatcaacacgtttgttgactgattctagcactgatgctttggaaaaagtgtccacatcgaatgaagatttctctttaaaggatgatgctcttgctaaaacctcaaaacgaaaaactaaggtacagaaagatgaaatctgtgcaaagttatcacatgtaataaagaagcaacacaggaagagtactttggtcgataatactatcaatttagatgaaaatttgactgtatctaacattgagagtttctattcaaggaaagatacaggagttcagaaaggagatggtttcatacacaatctttctttagaccctagtggtgttctggatgataagaatggagaacaaaaatctcaaaacaatgtattgccaaaagagaaacaattaaagaatgaagaattagttattttctctttccatgaaaacaattgtaaaatacaggaatttcatgttgatggtaaagaattgatcccttttacagaaatgaccaatgcttcagagaagaaatcatctccctttaaagatcttatgactgtacctgaatcaagagatgaggagatgagtaatagtaccagtgtgatttattctaacttgacaagagaacaggcccctgacatcagtcctaaatctgacaccttaacggattctcagatagacagagaccttcacaaattatctttactagctcaagccagtgttattacgttcccatccgattcacctcagaactcatcgcagctgcaaaggaaagtaaaagaagataaaagatgtttcacagctaaccaaaataatgttggagatacctcccgtggacaggttattattatttcagattctgatgatgatgatgatgaaagaatcctgagtcttgagaaactcactaaacaggacaaaatatgccttgagagggaacatccagagcagcacgtttcaacagttaatagtaaggaggaaaagaatccagtaaaggaagaaaagacagagactctttttcagtttgaggaatctgattctcagtgttttgagtttgaaagttcatctgaagtgttttcagtttggcaagatcatccagacgataataattcagttcaagatggtgagaaaaaatgtttggctcctatagccaatactacaaatggtcagggttgtacagattatgtatctgaagttgttaaaaaaggagcagagggcattgaagaacacacaagaccacggagtatttctgttgaagaattttgtgaaattgaagtaaaaaagcctaagagaaaacgatctgaaaaaccaatggctgaagatcctgtgaggccttcatcttctgtcagaaatgagggccagtctgatactaataagagagagcttgtgggaaatgattttaaaagtattgatagaaggacttcaactcccaattcacgtattcagagagccactacggtttcacaaaagaagtcttcaaagctttgtacttgtacagaacccatcaggaaagttccagtttctaagacccctaagaaaactcattcagatgccaaaaaaagacagaatagaagttcaaattacctaagttgtagaacaactcctgctatagtgccgccaaagaaatttcgtcagtgtcctgagccaacttcaacagctgagaaacttggcctgaaaaagggtcctcgtaaggcatatgagttgtcccagcggtctttggattatgtagctcaattacgtgatcatggcaaaactgttggagtagttgatacccgaaaaaagactaaattaatttctcctcagaacctgtctgtcagaaataataagaaacttctgactagtcaagaacttcagatgcaaaggcagatcagacccaaatcacaaaaaaatagacgaagactttctgattgtgaaagtacagatgttaaaagagcagggtcacatacagcacagaattctgacgtatttgtaccagaatctgataggtcagattataattgtacaggaggaactgaggtacttgccaacagtaacagaaaacagttaataaaatgcatgccttctgaaccagaaaccataaaagcaaaacatgggtctccagcaactgatgatgcttgccctttgaaccagtgtgattctgtagtgttaaatggaacagtaccaacaaatgaagtaattgtctccacttcagaagaccctctgggtggaggtgatccaacagcacgtcatatagagatggcagctttgaaagaaggagagcctgactccagcagtgatgcagaggaagataacttatttttaacccaaaatgatcctgaagatatggatttatgttcacaaatggagaatgacaattataaactcattgaactaattcatggaaaagatacagttgaggttgaagaagattctgtaagtcggcctcagttggaatctttgagtggcacaaagtgtaagtacaaagattgtcttgaaaccacaaaaaaccagggtgaatactgcccaaaacactctgaagtgaaagcagcagatgaagatgtatttcgtaaacctggcttgcctcctcctgcatctaaacctttgagacctaccactaagatttttagctcaaagagtacttcacgaattgctggtctttctaaatctttggaaacttcttcagcactttcaccgtctctaaaaaataagtcaaaggggatacagtcgattttgaaagtaccacagccagttcccctcatagctcagaagccagttggtgaaatgaagaattcgtgcaatgttcttcatcctcagtctccgaataattccaacaggcaaggttgcaaagttccatttggtgaaagcaaatattttccatcttcctctccagtaaacattcttttgtcatcacagtctgtctctgacaccttcgttaaagaggtcttaaaatggaaatatgaaatgtttttgaactttggtcagtgtgggccccctgcaagtctttgtcagtccatctcaagacctgtgcctgtcagatttcacaattatggagattattttaatgtttttttccctttgatggtattgaatacttttgaaacagtggcacaagaatggctcaactctccaaatagagagaatttctatcagttgcaagtacgaaaatttcctgccgattatataaaatactgggagtttgcagtttatctggaagaatgtgaactggctaaacagctttatccaaaggaaaacgatttggtgtttttagctcctgagagaataaatgaagagaagaaagatacaaagagaaatgacatacaagatctccacgaatatcattctggttatgttcataaatttcgccgcacgtcagtcatgcgtaatgggaaaactgagtgttacctttccatccagactcaagagaactttccggccaatttaaacgaacttgtgaattgtattgtaatcagttctctggtaactacacaaaggaagttgaaagccatgtctctgttgggtagtcggaaccaactggctagagctgttctgaatccaaaccctatggacttctgtacaaaagatttactgactacaacatctgagagaattattgcgtacttaagagatttcaatgaagatcaaaagaaagcaatagaaactgcatatgctatggtgaaacactcaccatcagttgccaaaatctgcttgattcatggaccacctggaacaggaaaatcaaaaactattgttggcctcctctatcgtctactgacagagaaccagaggaaggggcattcagacgaaaactccaatgccaaaatcaaacaaaaccgtgtcctcgtgtgtgcaccttccaatgcagctgttgatgaactcatgaaaaaaattatccttgaattcaaagaaaaatgtaaagacaagaagaatcctttaggaaactgtggagatataaatttagtacgactgggtccagaaaagtctattaatagtgaggttctaaagttcagtttggacagccaagtaaaccacagaatgaaaaaagagttaccttctcatgttcaggcgatgcataaaagaaaggaatttctagattatcagctggatgagctttcccggcagcgagctctatgccgaggtggacgggaaatacagaggcaagaattagatgaaaacatttccaaagtttctaaggaaaggcaggaacttgcttctaaaattaaagaggttcaaggacgcccacagaaaacacagagtatcatcatcttagagtcccatatcatctgctgcacgttgagcacaagtggtggtttactacttgagtctgctttccgtgggcaagggggtgtccccttcagctgtgtcattgttgatgaggctggacagtcttgtgaaattgagactcttactccactcatccatcgctgcaataagctcatcctagtaggagatcctaagcagctccctccgacagtcatctctatgaaagcacaggagtatggctacgaccagtcaatgatggctcgcttctgcagactgctggaagagaatgtagaacacaacatgatcagcaggctgcccattctacagctcactgttcagtacaggatgcatccagacatatgcctcttcccttctaattatgtttataacagaaacttaaaaacaaatagacagacagaagccattcgatgttcatcagattggccatttcagccataccttgtgtttgatgttggagatggttcagaaagacgggataatgactcatatataaatgttcaagaaataaaactggtgatggaaataattaagcttattaaagacaaaagaaaggatgttagttttcgaaacattggcataataactcattacaaggcccagaagacgatgattcagaaggatttggacaaagagttcgatagaaaaggaccagcagaagtagacactgtggatgcattccagggtcggcagaaggattgtgttattgttacgtgtgtcagagcaaatagcatccaaggttcaattggattcctggcaagtttgcagagattgaatgtcaccatcacacgagccaagtacagcctcttcatcctcggacatttgaggaccctgatggaaaaccagcattggaatcagctgattcaggatgctcagaagcgtggtgccattattaagacctgtgacaaaaactatagacatgatgcagtgaagattctgaaactcaagcctgtgctgcagagaagtctcactcaccctcctaccatagccccagaggggtccagaccccagggtggtttgcccagcagcaagctagacagtggatttgccaagacatctgttgctgcttctctataccacacaccctctgactccaaggaaattactcttactgttacttcaaaggaccctgaaagacctcctgttcatgaccaacttcaggacccacgactgctgaagaggatgggcattgaggtcaaaggaggaatattcctttgggatccacaaccctcgagcccccagcatcctggagcaacacctcctacgggcgagccgggcttccctgtcgttcaccaggacctgagccatatacagcagcccgctgctgtagtggctgctctgagcagccacaaacctcccgtgcggggcgaacctccagctgccagtcccgaggcttccacgtgtcagagcaaatgtgatgacccggaagaggagctctgtcacaggagagaggccagggctttcagtgaaggggagcaggagaagtgtggttccgagacccatcacaccaggaggaactctaggtgggacaagaggacactggagcaggaggacagcagttccaagaaaagaaagcttttataggaaagcccagtgacatgggccagcagccacagcatattgtaaactgaagatgaccagctcgtgggaccatctagataagcttgttttttgtaaggagtttgtgtgctgttggaaaacatggaaaatgcatccttaacacctgagcctctggtcatcttcagtattttctgtcatttgcaaaagctttcagagggcattgtgtatccgtaataatgtccttgaagtcagagactggaaatgttgatctcttagtcttctatagacaaggaggtcagactggagtgaatgttgtaaaagttgaaatgtatatttgtatagcaaataacaaaatccttttaaaattcaaaaaaaaaaaaaaaaaaa

SEQ ID NO: 155 - DNA, 3500 bp, Homo sapiens
ggaaaggaggaagaaggagattgtgatggagaaagggggtctgtgaaacgtcaggcacagcacaaaggctttgccacgtaattacaggctcctattaagtcgagatctgccctcccaggggtctccaattttcttgtattccctacaaagcctcctctgcatgccagtttgtgccttttgaagtgccagagagcttcttgatccaactgagaaggaaaaaggagcccagcaagaagagggggagagagagaaggggaaaggggggaacccaccagcaccctccgtcggactcttgaagccttttttttttaattcttaatttttttttttactctttacaaaaagtaaagtgagaatcctgctctctaatacatctgcaagacatcaccctctcctcctgaaactttagtcactcctgagaatccacaggagtgcagagaggggggaacacgttttcttgaagatgttttaaagctggaacaagccttcttctgttggtgcttgaactcttgcctgggaataacttttttaacctttaaaaaaaccattcactttgattcttctctcccaccccttcttctctcttcttctgtttgcctaactcccccgccctgctggcctccgctttcctctctcccccttgttattatttttagtctgtgcgtgtggacacttttggagagttggaagggatttttttctcctgacttgaacatagggtgactttttaatattgtattttactgtggattatctctttggaccgcgccggacttggcctcaggaaatcaaccaatgctgcggaaggcggctggtgcacaacgctctgctctacagaagggggtcccccaccctcttttccaattttttttttttggccttcctctccttccctccctcttcctccctctctctctctctctctccactacccccctctttcttccccactcggctcctctcccccctcgcgcccacagcgtttggtgttgattcgagcgggaagaggggggtgggtgggatcggtgggggagaccatgacctccagctacgggcacgttctggagcggcaaccggcgctgggcggccgcttggacagcccgggcaacctcgacaccctgcaggcgaaaaagaacttctccgtcagtcacctgctagacctggaggaagccggggacatggtggcggcacaggcggatgagaacgtgggcgaggctggccggagcctgctggagtcgccgggactcaccagcggcagcgacaccccgcagcaggacaatgaccagctgaactcagaagaaaaaaagaagagaaagcagcgaaggaataggacaaccttcaatagcagccagctgcaggctttggagcgtgtctttgagcggacacactatcctgatgcttttgtgcgagaagaccttgcccgccgggtgaacctcaccgaggcgagagtgcaggtgtggtttcagaaccgaagagccaagttccgcaggaatgagagagccatgctagccaataaaaacgcttccctcctcaaatcctactcaggagacgtgactgctgtggagcagcccatcgtacctcgtcctgctccgagacccaccgattatctctcctgggggacagcgtctccgtacagatcctcgtccctcccaagatgttgtttacacgaggggcttcataacggattctaacggaagacactgaaaagcgccatggctacttattctgccacatgtgccaacaatagccctgcacagggcatcaacatggccaacagcattgccaacctgagactgaaggccaaggaatatagtttacagaggaaccaggtgccaacagtcaactgaggaaaaaaaataattaaacaggcctaagaagaaatcaaaaaccataagacacctatcctgctctgttatttcttcatctgctggggggaaaaagtaaattacaaacaaacaaacaaagcagaactaaaatattgggaccatggcagagaaaagcaggagaggagcaaaatgaaaattagttaacaaatgttcctcctccctctgggataccaccaccacttgtttctgtgtgtgtttattttgtttttctttcattcatgctttgcttaatgtactccaggcttcttcagataggttcagcccacccacccccatgattgtatgaagttttaaaaaaaactacagcagccaaagaaactatatatatatatatatatatatatatccagaatgattgcctctactgtcctcattgacttgtttgaaccttagtgccttaccctgtcctcttcccagttctctttatagaagctctaggagctttcgaaaagccaaagtctttctgaagaatctgtgctggacagacataattccctttctcattgtctccatctttgttggtcatggtaaggtttttccatcagcctctgaaaaaatagttgtgcacaacatctgctcactggactgtctgatccaatgtaattggctgcgtctggctaattctaagcactaaagtctacatctaagctatagatttaagcttgaagctacagattatatcactatcaccaccacccctcaccctatgcaatcaatcaatcaatcatcttaagttaaagatatttgttgtctttgaatgatttgctgtcacagactatttggtagaagaaatatttttcacctgagagaggaagagaaatttctctagtaacacaaagagtgagttctaaaaggcatgcccacatctctttcgtgccttaaggatagtgagatgcacacttatatatatactgtatatatttatatatttatatatatatttcatatatatatataatattgcaagcttaagtttgcaatttcccaaacaatacaaaaagcaaattacacaccctcaccactgttcttatctctatagtgatgaaacattaattagggatcttgctgcttttctttttctacacgaagttttcattaaagccacagaataattgatagggcagctgtttgagaacaggtcccattttcacattagggctttaaatgaattagaaactatttgaggctataaaaatgtccttgagtttggagcctgagctctggtgaaatgctgatacatctgatctatcatgggaattgcagttagagagagtaaggaataccatttagtcatctatccgttcttcacttagcaggaatatgaaagaaaggcacatgtttaagaggaatacctaaaggtttttctaaattccaacatttaaaaggcaattgtgggctatttttattttttaatattttgaaataaagtttagtgtctagggctgggagccaggactgatcttccatttctttttctttgttcccagccatgcttttgtaacttgccaggtggacttgaccaactacattaccatgctgtgcctcagtttacccatttgtaaaatgggattaataatacttacctacctcacaggggtgttgtgaggctctatt

SEQ ID NO: 156 - DNA, 3480 bp, Homo sapiens
cgcccagcagcccgtgggcaggcgcggcggagcgagcggggccggcggcgggcgccgagggacgccgaggcctcgggcgggggctggcccggggttccaggtctccagtgggggctgcagactaagcaaaatgaggcggttcctgaggccagggcatgaccctgtgcgggagaggctcaagcgggacctgttccagtttaacaagacggtggagcatggcttcccgcaccagcccagcgccctcggctacagcccgtccctgcacatcctggccatcggcacccgttctggagccatcaagctctacggagccccaggcgtggagttcatggggctgcaccaggagaacaacgctgtgacgcagatccacctcctgcccggccagtgccagctggtcaccctgctggatgacaacagcctgcacctttggagcctgaaggtcaagggcggggcatcggagctgcaggaggatgagagcttcacactgcgtggacccccaggggctgcccccagtgccacacagatcaccgtggtcctgccacattcctcctgcgagctgctctacctgggcaccgagagtggcaacgtgtttgtggtgcagctgccagcttttcgtgcgctggaggaccggaccatcagctcggacgcggtgctgcagcggttgccagaggaggcccgccaccggcgtgtgttcgagatggtggaggcactgcaggagcaccctcgagaccccaaccagatcctgatcggctacagccgaggcctcgttgtcatctgggacctacagggcagccgcgtgctctaccacttcctcagcagccagcaactggagaacatctggtggcagcgggacggccgcctgctcgtcagctgtcactctgacggcagctactgccagtggcccgtgtccagcgaagcccagcaaccagagcccctccgcagcctcgtgccttacggtccctttccttgcaaagcgattaccagaatcctctggctgaccactaggcaggggttgcccttcaccatcttccagggtggcatgccacgggccagctacggggaccgccactgcatctcagtgatccacgatggccagcagacggccttcgacttcacctcccgtgtcatcggcttcactgtcctcacagaggcagaccctgcagccacctttgacgacccctatgccctggtggtgctggctgaggaggagctggtggtgattgacctgcagacagcaggctggccaccggtccagctgccctacctggcttctctgcactgttccgccatcacctgctctcaccacgtctccaacatcccgctgaagctgtgggagcggatcattgccgccggcagccggcagaacgcacacttctccaccatggagtggccaattgatggtggcaccagcctgaccccagccccaccccagagggacctgctgctcacagggcacgaggacggcacggtgcggttctgggatgcctcgggtgtctgcctgcggctgctctacaaactcagcactgtgcgcgtgttcctcaccgacacggaccccaacgagaacttcagtgcccagggcgaggacgagtggcccccactccgcaaggtgggctcctttgacccctacagtgatgacccccggctgggcatccagaagatcttcctctgcaagtacagcggctacctggctgtggcaggcacggcagggcaggtgctggtactggaactgaatgacgaggcagcggagcaggctgtggagcaggtggaggccgacctgctgcaggaccaagagggctaccgctggaaggggcacgagcgcctggcagcccgctcagggcccgtgcgctttgagcctggctttcagcccttcgtgttggtgcagtgtcagcccccggctgtggtcacctccttggccctgcactctgagtggcggctcgtggccttcggcaccagccatggctttggcctctttgaccaccagcagcggcggcaggtctttgttaagtgcacactgcaccccagtgaccagctggccttggagggcccactctcccgcgtcaagtccctcaagaagtccttgcgtcagtcattccgccggatgcgtcggagccgggtgtccagccggaagcggcacccggctggccccccaggagaggcacaggaggggagtgccaaggctgagcggccaggcctccagaacatggagctggcgcctgtgcagcgcaagatcgaggctcgctcggcagaggactccttcacaggcttcgtccggaccctgtactttgctgacacctacctgaaggacagctcccggcactgcccctcgctgtgggctggcaccaatgggggcaccatctatgccttctccctgcgtgtgcctcccgccgagcggagaatggatgagcctgtgcgggcagagcaggccaaggagatccagctgatgcaccgggcgccggtggtgggcatcctggtgctcgacggacacagcgtaccccttcccgagcccctcgaagtggcccatgatctgtcgaagagccctgacatgcagggaagccaccagctgctcgtcgtatcagaggagcagttcaaggtgttcacgctgcccaaggtgagtgccaagctgaagttgaagctgacggccctggagggctcaagagtgcggcgggtcagcgtggcccacttcggcagtcgtcgagccgaggactacggggagcaccacctggcagtccttaccaacctgggcgacatccaggtggtctcgctgcccctgctcaagccccaggtgcgctacagctgcatccgccgggaggacgtcagtggcatcgcctcctgcgtcttcaccaaatatggccaaggcttctacctgatctcaccctcggagtttgagcgcttctctctctccaccaagtggctggtggagccccggtgtctggtggattcagcagaaaccaagaaccaccgccctggtaacggtgcgggccccaagaaggccccgagccgagccaggaactcagggactcagagtgatggcgaggagaagcagcccggcctggtgatggagcgcgctctgctcagtgatgagagagcggcaactggcgttcacatcgagccgccgtggggtgcagcctcagcaatggcggagcagagtgagtggctgagcgtccaggctgcgcgatgagcacacactactactgatggcctttcgggggtccctgccccaaccggagaggccggtgcacagggccccgccaggggctgggggcatcccggcttccacaatgcagctgctctgggcctcgggagaggagagaccccagtcccctgggctgcccttcccgggcctcgtctgtctgggtcctttggtcaatgttgcacagtttttattgctcccatccctttttgtagtgggctgggttttaagttataaatgttaactgcctctgggtgaaaaagtttttaataaacacctattacctcttg

SEQ ID NO: 157 - DNA, 552 bp, Homo sapiens
ctcatatttcacacagatgagttggcgaggaagatcgacctattattggtctaggccaataataggtcgatcttcctcgccaactcatatttcacacagatgaatctcagtagaggaaaatcgacctattattggcctagaccaaggcgctatgtacagcctcctgaagtgattgggcctatgcggcccgagcagttcagtgatgaagtggaaccagcaacacctgaagaaggggaaccagcaactcaacgtcaggatcctgcagctgctcaggagggagaggatgagggagcatctgcaggtcaagggccgaagcctgaagctgatagccaggaacagggtcacccacagactgggtgtgagtgtgaagatggtcctgatgggcaggagatggacccgccaaatccagaggaggtgaaaacgcctgaagaaggtgaaaagcaatcacagtgttaaaagaaggcacgttgaaatgatgcaggctgctcctatgttggaaatttgttcattaaaattctcccaataaagctttacagccttctgcaaagaaaa

SEQ ID NO: 158 - DNA, 2318 bp, Homo sapiens
ggctgccccctccgccaccgccgccgcccgccggcaggttccctggtcagcgtcccatcccggtcgggagttctctccaggcggcacgatgccgaggaaacagtgaccctgagcgaagccaagccgggcggcaggaacttctgcaatgtcccatcaacctctcagctgcctcactgaaaaggaggacagccccagtgaaagcacaggaaatggacccccccacctggcccacccaaacctggacacgtttaccccggaggagctgctgcagcagatgaaagagctcctgaccgagaaccaccagctgaaagaagccatgaagctaaataatcaagccatgaaagggagatttgaggagctttcggcctggacagagaaacagaaggaagaacgccagttttttgagatacagagcaaagaagcaaaagagcgtctaatggccttgagtcatgagaatgagaaattgaaggaagagcttggaaaactaaaagggaaatcagaaaggtcatctgaggaccccactgatgactccaggcttcccagggccgaagcggagcaggaaaaggaccagctcaggacccaggtggtgaggctacaagcagagaaggcagacctgttgggcatcgtgtctgaactgcagctcaagctgaactccagcggctcctcagaagattcctttgttgaaattaggatggctgaaggagaagcagaagggtcagtaaaagaaatcaagcatagtcctgggcccacgagaacagtctccactggcacggcattgtctaaatataggagcagatctgcagatggggccaagaattacttcgaacatgaggagttaactgtgagccagctcctgctgtgcctaagggaagggaatcagaaggtggagagacttgaagttgcactcaaggaggccaaagaaagagtttcagattttgaaaagaaaacaagtaatcgttctgagattgaaacccagacagaggggagcacagagaaagagaatgatgaagagaaaggcccggagactgttggaagcgaagtggaagcactgaacctccaggtgacatctctgtttaaggagcttcaagaggctcatacaaaactcagcgaagctgagctaatgaagaagagacttcaagaaaagtgtcaggcccttgaaaggaaaaattctgcaattccatcagagttgaatgaaaagcaagagcttgtttatactaacaaaaagttagagctacaagtggaaagcatgctatcagaaatcaaaatggaacaggctaaaacagaggatgaaaagtccaaattaactgtgctacagatgacacacaacaagcttcttcaagaacataataatgcattgaaaacaattgaggaactaacaagaaaagagtcagaaaaagtggacagggcagtgctgaaggaactgagtgaaaaactggaactggcagagaaggctctggcttccaaacagctgcaaatggatgaaatgaagcaaaccattgccaagcaggaagaggacctggaaaccatgaccatcctcagggctcagatggaagtttactgttctgattttcatgctgaaagagcagcgagagagaaaattcatgaggaaaaggagcaactggcattgcagctggcagttctgctgaaagagaatgatgctttcgaagacggaggcaggcagtccttgatggagatgcagagtcgtcatggggcgagaacaagtgactctgaccagcaggcttaccttgttcaaagaggagctgaggacagggactggcggcaacagcggaatattccgattcattcctgccccaagtgtggagaggttctgcctgacatagacacgttacagattcacgtgatggattgcatcatttaagtgttgatgtatcacctccccaaaactgttggtaaatgtcagattttttcctccaagagttgtgcttttgtgttatttgttttcactcaaatattttgcctcattattcttgttttaaaagaaagaaaacaggccgggcacagtggctcatgcctgtaatcccagcactttgggaggtcgaggtgggtggatcacttggggtcagggtttgagaccagcctggccaacatggcggaaccctgtctctaccaaaattacaaaaattagccgagcatggtggcgcatgcctgtagtcgcagctactcgcgaggttgaggcaggagaattgcttgaacccaggaagtggcagttgcagtgagccgagacgacaccactgcactccagcctgggtgacagagggagactctgtctcgaaagaaaaaaaaaaaaaaaaaaaaaa

SEQ ID NO: 159 - DNA, 1937 bp, Homo sapiens
ggccgcagtttctggagggagccgctgcgggtctttccctcactcgtcctccgcgcgtcgccgctcttcggttctgctctgtccgccgccatggcccaagctgacatcgcgctgatcggattggccgtcatgggccagaacttaattctgaacatgaatgaccacggctttgtggtctgtgcttttaataggactgtctccaaagttgatgatttcttggccaatgaggcaaagggaaccaaagtggtgggtgcccagtccctgaaagagatggtctccaagctgaagaagccccggcggatcatcctcctggtgaaggctgggcaagctgtggatgatttcatcgagaaattggtaccattgttggatactggtgacatcatcattgacggaggaaattctgaatatagggacaccacaagacggtgccgagacctcaaggccaagggaattttatttgtggggagcggagtcagtggtggagaggaaggggcccggtatggcccatcgctcatgccaggagggaacaaagaagcgtggccccacatcaagaccatcttccaaggcattgctgcaaaagtgggaactggagaaccctgctgtgactgggtgggagatgagggagcaggccacttcgtgaagatggtgcacaacgggatagagtatggggacatgcagctgatctgtgaggcataccacctgatgaaagacgtgctgggcatggcgcaggacgagatggcccaggcctttgaggattggaataagacagagctagactcattcctgattgaaatcacagccaatattctcaagttccaagacaccgatggcaaacacctgctgccaaagatcagggacagcgcggggcagaagggcacagggaagtggaccgccatctccgccctggaatacggcgtacccgtcaccctcattggagaagctgtctttgctcggtgcttatcatctctgaaggatgagagaattcaagctagcaaaaagctgaagggtccccagaagttccagtttgatggtgataagaaatcattcctggaggacattcggaaggcactctacgcttccaagatcatctcttacgctcaaggctttatgctgctaaggcaggcagccaccgagtttggctggactctcaattatggtggcatcgccctgatgtggagagggggctgcatcattagaagtgtattcctaggaaagataaaggatgcatttgatcgaaacccggaacttcagaacctcctactggacgacttctttaagtcagctgttgaaaactgccaggactcctggcggcgggcagtcagcactggggtccaggctggcattcccatgccctgttttaccactgccctctccttctatgacgggtacagacatgagatgcttccagccagcctcatccaggctcagcgggattacttcggggctcacacctatgaactcttggccaaaccagggcagtttatccacaccaactggacaggccatggtggcaccgtgtcatcctcgtcatacaatgcctgatcatgctgctcctgtcaccctccacgattccacagaccaggacattccatgtgcctcatggcactgccacctggccctttgccctattttctgttcagttttttaaaagtgttgtaagagactcctgaggaagacacacagtttatttgtaaagtagctctgtgagagccaccatgccctctgcccttgcctcttgggactgaccaggagctgctcatgtgcgtgagagtgggaaccatctccttgcggcagtggcttccgcgtgccccgtgtgctggtgcggttcccatcacgcagacaggaagggtgtttgcgcactctgatcaactggaacctctgtatcatgcggctgaattccctttttcctttactcaataaaagctacatcacactga

SEQ ID NO: 160 - DNA, 1306 bp, Homo sapiens
gaacggcggcgggaggtgaaatccggttctaaccggtccggggctcccagcgctataaaaactttataaaccccccggagcccgagcagtgtgaagaagaggcgagaacgacccccggaccgaccaaagcccgcgcgccgctgcatcccgcgtccagcacctacgtcccgctgccgtcgccgccgccaccatgcccaagagaaaggctgaaggggatgctaagggagataaagcaaaggtgaaggacgaaccacagagaagatccgcgaggttgtctgctaaacctgctcctccaaagccagagcccaagcctaaaaaggcccctgcaaagaagggagagaaggtacccaaagggaaaaagggaaaagctgatgctggcaaggaggggaataaccctgcagaaaatggagatgccaaaacagaccaggcacagaaagctgaaggtgctggagatgccaagtgaagtgtgtgcatttttgataactgtgtacttctggtgactgtacagtttgaaatactattttttatcaagttttataaaaatgcagaattttgttttactttttttttttttaaaagctatgttgttagcacacagaacacttcattgttgtttttgggggaaggggcatatgtcactaatagaatgtctccaaagctggattgatgtggagaaaacacctttcccttctagttttgagagacttcctcttggctcccaggaggagggattccctgactttgacacacatggccaccttggcacaaaagccttgtggtatagaaaaacaaatttgtttttatgtcctcttctccctttccatctttcagcatagacttaactcccttaagcccagacatctgttgagacctgacccctagtcattggttaccagtgtgtcaggcaatctggactttccagtgatgccactgagatggcacctgtcaaaagagcagtggttccatttctagattgtggatcttcagataaattctgccattttcatttcacttcctgaaagtcagggtcggcttgtgaaaagttgttaaacaacatgctaaatgtgaaatgtcaaccctcactctaaactttccctgttcagagcatcagatgaagacttcattgggttttatagtggctttctgatttttggtagtccattgaagaagggagtttgaaagttgttgtatactgttaacgattgtctgcccatgtcctgcctgaaataccatgattgtttatggaaagtatctttaataaagctggatacagtttggcttggaaaaaaaaaaaaaaaaaaaaaaa

SEQ ID NO: 161 - DNA, 1068 bp, Homo sapiens
gcgcggggcacgctgggacgtctcgctggcgggaggccacgggctttccacagcgcgggggaacgggaggctgcaggatggtcaagctgacggcggagctgatcgagcaggcggcgcagtacaccaacgcggtgcgcgaccgggagctggacctccgggggtataaaattcccgtcattgaaaatctaggtgctacgttagaccagtttgatgctattgatttttctgacaatgagatcaggaaactggatggttttcctttgttgagaagactgaaaacattgttagtgaacaacaacagaatatgccgtataggtgagggacttgatcaggctctgccctgtctgacagaactcattctcaccaataatagtctcgtggaactgggtgatctggaccctctggcatctctcaaatcgctgacttacctaagtatcctaagaaatccggtaaccaataagaagcattacagattgtatgtgatttataaagttccgcaagtcagagtactggatttccagaaagtgaaactaaaagagcgtcaggaagcagagaaaatgttcaagggcaaacggggtgcacagcttgcaaaggatattgccaggagaagcaaaacttttaatccaggtgctggtttgccaactgacaaaaagaaaggtgggccatctccaggggatgtagaagcaatcaagaatgccatagcaaatgcttcaactctggctgaagtggagaggctgaaggggttgctgcagtctggtcagatccctggcagagaacgcagatcagggcccactgatgatggtgaagaagagatggaagaagacacagtcacaaacgggtcctgagcagtgaggcagatgtataataataggccctcttggaacaagtcttgcttttcgaacatggtataatagccttgtttgtgttagcaaagtggaatctatcagcattgttgaaatgcttaagactgctgctgataattttgtaatataagttttgaaatctaaatgtcaattttctacaaattataaaaataaactccactcactatgctaccaaaaaaaaaaa

SEQ ID NO: 162 - DNA, 2184 bp, Homo sapiens
ggatcctggaggtgggggctgtgccctgagggagggcacagggaaccgggatggggctgggggacagcgagtgctgggaagtgtgcgagatttcactccggggctcgggtcgagctaccccgtgcttcaggcggtcctgcgcctcctctccccaagacccttcggggacacagcactgcagacccgccggagacaacttgtgcgggagcccggagtcctcggaataacacttggtaagtgttaccgcgcccttcttcccttacgccagtccgtagttcgtggtccttcgccggtgtccccggagcccagcggctgtggatggcagaagcccagagtgggactggtcagctgcaggagcagaagaaaggtcttctgatagccgtcagcgtctccgttgataaaatcatctcgcatttcggggccgcccggaacttggtgcagaaggcccagttgggtgatagccggctgagcccggatgtggggcacctggtgctgaccaccctctgcccggccctccacgccctggtggcggacgggctgaagcctttccggaaggacctcatcaccgggcagcgcaggagcagcccctggagcgtggtggaggcgtcggtgaagccaggctccagcacccgctcccttggaaccctgtatagccaggtcagccgtctagccccgctgagcagcagccgtagccgcttccatgcctttatcctgggcctcctcaacaccaagcagttggagctgtggttttccagtctccaggaagatgcaggcctgctctccctcctgtacctgccaacaggatttttctccctggcccgcggtggttgtccctccctgtccacagagctgctgctcctgctgcagccattgtcggtgctcactttccacctggacctgctctttgagcaccaccaccacctgcccctgggcccacctcaggcccctgcccctccaggcccacctccagctctgcagcagactatgcaagccatgctgcactttgggggccggctggcccagagccttcgggggacttccaaggaagctgcttcagacccctctgactctccaaaccttcccacaccagggagctggtgggagcagttgacccaggcctcccgggtctatgcctctgggggcactgagggctttcctctttcccgatgggcaccggggcgtcatgggactgcagctgaagaaggtgcacaggagagacccctgcccacagatgagatggcaccaggcaggggcctctggttgggaagactatttggagtgcctgggggccccgcagaaaatgagaatggagccctaaagtccaggagaccatctagctggctgcccccgacagtgagtgtgttggctcttgtgaagcggggggcacctcccgagatgccttctcctcaggagcttgaggcctcagcacccaggatggtgcaaacccatagggcagtgcgggctctctgtgatcacactgctgcaagacctgaccagttgagcttccggcgtggggaagtgctgcgtgtcatcaccacagtggatgaggactggctccgctgtgggcgggatggcatggagggtctggtgcctgtggggtatacctcccttgttctgtagccctgggaccctttcctgcgtatgtgtctccttcctgtcacctgggaatggaatggccagtgaacaccatcccagaagcattttccctctgcaaaatgacgtttcttcccacgtctgtttctgctaatatttaaaataaactttccttcttccctcctatacccacctgtaaggtgaaatctgctcttcttccaaatatataaaaaaggaattgccctccaggtaatccctttcctttttcccgtctatataagggaatgtcttccttcctatctatctgcaaaatggaaatctagacctccttcttcatccataagtggactgtgccagtacaatacatgcctcagcccccaagcctagaaggacctctagtctccttcctgtgtggaatcttccccactccatccctcccaagttgcctgtattgataatgtactcactcatgctgtactaggtgctgaagcctggacacccttggtgggtgggcctgtggtgatggtttgcatccttcctcccttgtcccaataaagtatgggagttgaaaaaaaaaaaaaaaaaaaaaaa

SEQ ID NO: 163 - DNA, 598 bp, Homo sapiens
cagagtcactcctgccttcaccatgaagtccagcggcctcttccccttcctggtgctgcttgccctgggaactctggcaccttgggctgtggaaggctctggaaagtccttcaaagctggagtctgtcctcctaagaaatctgcccagtgccttagatacaagaaacctgagtgccagagtgactggcagtgtccagggaagaagagatgttgtcctgacacttgtggcatcaaatgcctggatcctgttgacaccccaaacccaacaaggaggaagcctgggaagtgcccagtgacttatggccaatgtttgatgcttaacccccccaatttctgtgagatggatggccagtgcaagcgtgacttgaagtgttgcatgggcatgtgtgggaaatcctgcgtttcccctgtgaaagcttgattcctgccatatggaggaggctctggagtcctgctctgtgtggtccaggtcctttccaccctgagacttggctccaccactgatatcctcctttggggaaaggcttggcacacagcaggctttcaagaagtgccagttgatcaatgaataaataaacgagcctatttctctttgcac

SEQ ID NO: 164 - DNA, 1856 bp, Homo sapiens
ctgacttggcaggactgtgcaattgtcagaaggccgtggggagtgggggccagtgcctgcagcctgccctgcctctctcacaggcccttagagcatcgccaggtgcagagctccacagctctctttcccaaggagtaatcagagggtgagaacgtggagcctggtggacaggtgaaagcactgggatctttctgcccagaaaggggaaagttgcacatttatatcctagagggaagcgacagcagtgcttctccctgtgctgaggtacaggagccatgtggctagaaatcctcctcacttcagtgctgggctttgccatctactggttcatctcccgggacaaagaggaaactttgccacttgaagatgggtggtgggggccaggcacgaggtccgcagccagggaggacgacagcatccgccctttcaaggtggaaacgtcagatgaggagatccacgacttacaccagaggatcgataagttccgtttcaccccacctttggaggacagctgcttccactatggcttcaactccaactacctgaagaaagtcatctcctactggcggaatgaatttgactggaagaagcaggtggagattctcaacagataccctcacttcaagactaagattgaagggctggacatccacttcatccacgtgaagcccccccagctgcccgcaggccataccccgaagcccttgctgatggtgcacggctggcccggctctttctacgagttttataagatcatcccactcctgactgaccccaagaaccatggcctgagcgatgagcacgtttttgaagtcatctgcccttccatccctggctatggcttctcagaggcatcctccaagaaggggttcaactcggtggccaccgccaggatcttttacaagctgatgctgcggctgggcttccaggaattctacattcaaggaggggactgggggtccctgatctgcactaatatggcccagctggtgcccagccacgtgaaaggcctgcacttgaacatggctttggttttaagcaacttctctaccctgaccctcctcctgggacagcgtttcgggaggtttcttggcctcactgagagggatgtggagctgctgtaccccgtcaaggagaaggtattctacagcctgatgagggagagcggctacatgcacatccagtgcaccaagcctgacaccgtaggctctgctctgaatgactctcctgtgggtctggctgcctatattctagagaagttttccacctggaccaatacggaattccgatacctggaggatggaggcctggaaaggaagttctccctggacgacctgctgaccaacgtcatgctctactggacaacaggcaccatcatctcctcccagcgcttctacaaggagaacctgggacagggctggatgacccagaagcatgagcggatgaaggtctatgtgcccactggcttctctgccttcccttttgagctattgcacacgcctgaaaagtgggtgaggttcaagtacccaaagctcatctcctattcctacatggttcgtgggggccactttgcggcctttgaggagccggagctgctcgcccaggacatccgcaagttcctgtcggtgctggagcggcaatgacccacccctctccccccgcctgccacctccccccacaagtgccctccaggcttttcttggggaagataccccttttctgaggaatgagtttgcctccgtcccctgcccatgctgggagcccacgctcaccccctcacccctccaagctcactccccaacccccaactccgtgtggtaagcaacatggctttgatgataaacgactttactcta

SEQ ID NO: 165 - DNA, 2438 bp, Homo sapiens
cccggcggcgccaaccgaagcgccccgcctgatccgtgtccgacatgctgcgccgcgctctgctgtgcctggccgtggccgccctggtgcgcgccgacgcccccgaggaggaggaccacgtcctggtgctgcggaaaagcaacttcgcggaggcgctggcggcccacaagtacctgctggtggagttctatgccccttggtgtggccactgcaaggctctggcccctgagtatgccaaagccgctgggaagctgaaggcagaaggttccgagatcaggttggccaaggtggacgccacggaggagtctgacctggcccagcagtacggcgtgcgcggctatcccaccatcaagttcttcaggaatggagacacggcttcccccaaggaatatacagctggcagagaggctgatgacatcgtgaactggctgaagaagcgcacgggcccggctgccaccaccctgcctgacggcgcagctgcagagtccttggtggagtccagcgaggtggctgtcatcggcttcttcaaggacgtggagtcggactctgccaagcagtttttgcaggcagcagaggccatcgatgacataccatttgggatcacttccaacagtgacgtgttctccaaataccagctcgacaaagatggggttgtcctctttaagaagtttgatgaaggccggaacaactttgaaggggaggtcaccaaggagaacctgctggactttatcaaacacaaccagctgccccttgtcatcgagttcaccgagcagacagccccgaagatttttggaggtgaaatcaagactcacatcctgctgttcttgcccaagagtgtgtctgactatgacggcaaactgagcaacttcaaaacagcagccgagagcttcaagggcaagatcctgttcatcttcatcgacagcgaccacaccgacaaccagcgcatcctcgagttctttggcctgaagaaggaagagtgcccggccgtgcgcctcatcaccctggaggaggagatgaccaagtacaagcccgaatcggaggagctgacggcagagaggatcacagagttctgccaccgcttcctggagggcaaaatcaagccccacctgatgagccaggagctgccggaggactgggacaagcagcctgtcaaggtgcttgttgggaagaactttgaagacgtggcttttgatgagaaaaaaaacgtctttgtggagttctatgccccatggtgtggtcactgcaaacagttggctcccatttgggataaactgggagagacgtacaaggaccatgagaacatcgtcatcgccaagatggactcgactgccaacgaggtggaggccgtcaaagtgcacagcttccccacactcaagttctttcctgccagtgccgacaggacggtcattgattacaacggggaacgcacgctggatggttttaagaaattcctggagagcggtggccaggatggggcaggggatgatgacgatctcgaggacctggaagaagcagaggagccagacatggaggaagacgatgatcagaaagctgtgaaagatgaactgtaatacgcaaagccagacccgggcgctgccgagacccctcgggggctgcacacccagcagcagcgcacgcctccgaagcctgcggcctcgcttgaaggagggcgtcgccggaaacccagggaacctctctgaagtgacacctcacccctacacaccgtccgttcacccccgtctcttccttctgcttttcggtttttggaaagggatccatctccaggcagcccaccctggtggggcttgtttcctgaaaccatgatgtactttttcatacatgagtctgtccagagtgcttgctaccgtgttcggagtctcgctgcctccctcccgcgggaggtttctcctctttttgaaaattccgtctgtgggatttttagacatttttcgacatcagggtatttgttccaccttggccaggcctcctcggagaagcttgtcccccgtgtgggagggacggagccggactggacatggtcactcagtaccgcctgcagtgtcgccatgactgatcatggctcttgcatttttgggtaaatggagacttccggatcctgtcagggtgtcccccatgcctggaagaggagctggtggctgccagccctggggcccggcacaggcctgggccttccccttccctcaagccagggctcctcctcctgtcgtgggctcattgtgaccactggcctctctacagcacggcctgtggcctgttcaaggcagaaccacgacccttgactcccgggtggggaggtggccaaggatgctggagctgaatcagacgctgacagttcttcaggcatttctatttcacaatcgaattgaacacattggccaaataaagttgaaattttaccaccaaaaaaaaaaaaaaaa

SEQ ID NO: 166 - DNA, 1223 bp, Homo sapiens
gggatccttgagtcctactcagccccagcggaggtgaaggacgtccttccccaggagccgactggccaatcacaggcaggaagatgaaggttctgtgggctgcgttgctggtcacattcctggcaggatgccaggccaaggtggagcaagcggtggagacagagccggagcccgagctgcgccagcagaccgagtggcagagcggccagcgctgggaactggcactgggtcgcttttgggattacctgcgctgggtgcagacactgtctgagcaggtgcaggaggagctgctcagctcccaggtcacccaggaactgagggcgctgatggacgagaccatgaaggagttgaaggcctacaaatcggaactggaggaacaactgaccccggtggcggaggagacgcgggcacggctgtccaaggagctgcaggcggcgcaggcccggctgggcgcggacatggaggacgtgtgcggccgcctggtgcagtaccgcggcgaggtgcaggccatgctcggccagagcaccgaggagctgcgggtgcgcctcgcctcccacctgcgcaagctgcgtaagcggctcctccgcgatgccgatgacctgcagaagcgcctggcagtgtaccaggccggggcccgcgagggcgccgagcgcggcctcagcgccatccgcgagcgcctggggcccctggtggaacagggccgcgtgcgggccgccactgtgggctccctggccggccagccgctacaggagcgggcccaggcctggggcgagcggctgcgcgcgcggatggaggagatgggcagccggacccgcgaccgcctggacgaggtgaaggagcaggtggcggaggtgcgcgccaagctggaggagcaggcccagcagatacgcctgcaggccgaggccttccaggcccgcctcaagagctggttcgagcccctggtggaagacatgcagcgccagtgggccgggctggtggagaaggtgcaggctgccgtgggcaccagcgccgcccctgtgcccagcgacaatcactgaacgccgaagcctgcagccatgcgaccccacgccaccccgtgcctcctgcctccgcgcagcctgcagcgggagaccctgtccccgccccagccgtcctcctggggtggaccctagtttaataaagattcaccaagtttcacgcaaaaaaaaaaaaaaaaaaaaaaaaaaaaaaaaaaaaaaaaaaaa

SEQ ID NO: 167 - protein, 5 aa, Artificial Sequence
  Synthetic Protein
  misc_feature (2)..(3): Xaa can be any naturally occurring amino acid
LXXLL
